(19) United States
(12) Patent Application Publication
(10) Pub. No.: US 2019/0017075 A1
(43) Pub. Date: Jan. 17, 2019

(54) ENGINEERED MEGANUCLEASES WITH RECOGNITION SEQUENCES FOUND IN THE HUMAN BETA-2 MICROGLOBULIN GENE

(71) Applicant: Precision BioSciences, Inc., Durham, NC (US)

(72) Inventors: Victor Bartsevich, Durham, NC (US); Christina Pham, Durham, NC (US); Aaron Martin, Carrboro, NC (US); Derek Jantz, Durham, NC (US); James Jefferson Smith, Morrisville, NC (US); Michael G. Nicholson, Chapel Hill, NC (US)

(73) Assignee: Precision BioSciences, Inc., Durham, NC (US)

(21) Appl. No.: 16/065,756

(22) PCT Filed: Dec. 22, 2016
(86) PCT No.: PCT/US2016/068289

§ 371 Date: Jun. 22, 2018

Related U.S. Application Data
(60) Provisional application No. 62/416,513, filed on Nov. 2, 2016.
(60) Provisional application No. 62/387,318, filed on Dec. 23, 2015.

(51) Int. Cl. C12N 15/90; C12N 9/22; C12N 15/62; C12N 15/52; A61K 47/69; A61K 35/17

(52) U.S. Cl. CPC C12N 15/907; C12N 9/22; A61K 35/17; C12N 15/52; A61K 47/6901; C12N 15/62

(57) ABSTRACT

Disclosed herein are recombinant meganucleases engineered to recognize and cleave a recognition sequence present in the human beta-2 microglobulin gene. The disclosure further relates to the use of such recombinant meganucleases in methods for producing genetically-modified eukaryotic cells, and to a population of genetically-modified T cells having reduced cell-surface expression of beta-2 microglobulin.

### CROSS REFERENCE TO RELATED APPLICATIONS

[0001] This application claims priority to U.S. Provisional Application No. 62/387,318, entitled “Engineered Meganucleases with Recognition Sequences Found in the Human Beta-2 Microglobulin Gene,” filed Dec. 23, 2015, and U.S. Provisional Application No. 62/416,513, entitled “Engineered Meganucleases with Recognition Sequences Found in the Human Beta-2 Microglobulin Gene,” filed Nov. 2, 2016, the disclosures of which are hereby incorporated by reference in their entireties.

### FIELD OF THE INVENTION

[0002] The present disclosure relates to the field of molecular biology and recombinant nucleic acid technology. In particular, the present disclosure relates to recombinant meganucleases engineered to recognize and cleave recognition sequences found in the human beta-2 microglobulin gene. The present disclosure further relates to the use of such recombinant meganucleases in methods for producing genetically-modified eukaryotic cells, and to a population of genetically-modified cells having reduced cell-surface expression of beta-2 microglobulin.

### REFERENCE TO A SEQUENCE LISTING SUBMITTED AS A TEXT FILE VIA EFS-WEB

[0003] Filed with the instant application is a paper copy of a Sequence Listing which is hereby incorporated by reference in its entirety. This paper copy corresponds to a copy in ASCII format which is also hereby incorporated by reference in its entirety. Said ASCII copy, created on Dec. 20, 2016, is named 2000706-00181WO1.txt, and is 741,693 bytes in size.

### BACKGROUND OF THE INVENTION

[0004] T cell adoptive immunotherapy is a promising approach for cancer treatment. This strategy utilizes isolated human T cells that have been genetically-modified to enhance their specificity for a specific tumor associated antigen. Genetic modification may involve the expression of a chimeric antigen receptor (CAR) or an exogenous T cell receptor to graft antigen specificity onto the T cell. By contrast to exogenous T cell receptors, CARs derive their specificity from the variable domains of a monoclonal antibody. Thus, T cells expressing CARs induce tumor immunoreactivity in a major histocompatibility complex (MHC) non-restricted manner. To date, T cell adoptive immunotherapy has been utilized as a clinical therapy for a number of cancers, including B cell malignancies (e.g., acute lymphoblastic leukemia (ALL), B cell non-Hodgkin lymphoma (NHL), and chronic lymphocytic leukemia), multiple myeloma, neuroblastoma, glioblastoma, advanced gliomas, ovarian cancer, mesothelioma, melanoma, and pancreatic cancer.

[0005] Despite its potential usefulness as a cancer treatment, adoptive immunotherapy has been limited, in part, by alloreactivity between host tissues and allogeneic CAR T cells. One cause of alloreactivity arises from the presence of non-host MHC class I molecules on the cell-surface of CAR T cells. MHC class I molecules consist of two polypeptide chains, α and β. In humans, the a chain consists of three subunits, α1, α2, and α3, which are encoded by polymorphic human leukocyte antigen (HLA) genes on chromosome 6. The variability of HLA loci, and the encoded a chain subunits, can cause allogeneic CAR T cells to be seen by the host immune system as foreign cells because they bear foreign MHC class I molecules. As a result, CAR T cells administered to a patient can be subject to host versus graft (HvG) rejection, where they are recognized and killed by the host's cytotoxic T cells.

[0006] The β chain of MHC class I molecules consists of beta-2 microglobulin, which is encoded by the non-polymorphic beta-2 microglobulin (B2M) gene on chromosome 15 (SEQ ID NO: 1). Beta-2 microglobulin is non-covalently linked to α3 subunit and is common to all MHC class I molecules. Furthermore, expression of MHC class I molecules at the cell surface requires its association with beta-2 microglobulin. As such, beta-2 microglobulin represents a logical target for suppressing the expression of MHC class I molecules on CAR T cells, which could render the cells invisible to host cytotoxic T cells and reduce alloreactivity.

[0007] Another cause of alloreactivity to CAR T cells is the expression of the endogenous T cell receptor on the cell surface. T cell receptors typically consist of variable α and β chains or, in smaller numbers, variable γ and δ chains. The T cell receptor complexes with accessory proteins, including CD3, and functions with cell-surface co-receptors (e.g., CD4 and CD8) to recognize antigens bound to MHC molecules on antigen presenting cells. In the case of allogeneic CAR T cells, expression of endogenous T cell receptors may cause the cell to recognize host MHC antigens following administration to a patient, which can lead to the development of graft-versus-host-disease (GVHD).

[0008] To forestall alloreactivity, clinical trials have largely focused on the use of autologous CAR T cells, wherein a donor's T cells are isolated, genetically-modified to incorporate a chimeric antigen receptor, and then re-infused into the same subject. An autologous approach provides immune tolerance to the administered CAR T cells; however, this approach is constrained by both the time and expense necessary to produce patient-specific CAR T cells after a patient's cancer has been diagnosed.

[0009] Therefore, a need exists for the development of allogeneic CAR T cells that lack expression of beta-2 microglobulin and MHC class I molecules, as well as cells that further lack expression of endogenous T cell receptors.

### SUMMARY OF THE INVENTION

[0010] The present disclosure provides a recombinant meganuclease that is engineered to recognize and cleave a recognition sequence within the human beta-2 microglobulin gene (SEQ ID NO: 1). Such a meganuclease is useful for disrupting the beta-2 microglobulin gene and, consequently, disrupting the expression and/or function of endogenous MHC class I receptors. Meganuclease cleavage can disrupt gene function either by the mutagenic action of non-homologous end joining or by promoting the introduction of an exogenous polynucleotide into the gene via homologous recombination. The present disclosure further provides methods comprising the delivery of a recombinant meganuclease protein, or genes encoding a recombinant meganuclease, to a eukaryotic cell in order to produce a genetically-modified eukaryotic cell.

[0011] The present disclosure further provides for “off the shelf” CAR T cells, prepared using T cells from a third party donor, that are not alloreactive and do not induce HvG rejection or GVHD because they lack expression of beta-2 microglobulin and MHC class I molecules and/or further lack expression of endogenous T cell receptors. Such products can be generated and validated in advance of diagnosis, and can be made available to patients as soon as necessary.

[0012] The present disclosure further relates to the use of site-specific, rare-cutting, homing endonucleases (also called “meganucleases”) that are engineered to recognize specific DNA sequences in a locus of interest. Homing endonucleases are a group of naturally-occurring nucleases which recognize 15-40 base pair cleavage sites commonly found in the genomes of plants and fungi. They are frequently associated with parasitic DNA elements, such as group 1 self-splicing introns and inteins. They naturally promote homologous recombination or gene insertion at specific locations in the host genome by producing a double-stranded break in the chromosome, which recruits the cellular DNA-repair machinery (Stoddard (2006), Q. Rev. Biophys. 38:49-95). Homing endonucleases are commonly grouped into four families: the LAGLIDADG (SEQ ID NO: 11) family, the GIY-YIG family, the His-Cys box family and the HNH family. These families are characterized by structural motifs, which affect catalytic activity and recognition sequence. For instance, members of the LAGLIDADG (SEQ ID NO: 11) family are characterized by having either one or two copies of the conserved LAGLIDADG (SEQ ID NO: 11) motif (Chevalier et al. (2001), Nucleic Acids Res. 29(18): 3757-3774). The LAGLIDADG (SEQ ID NO: 11) homing endonucleases with a single copy of the LAGLIDADG (SEQ ID NO:11) motif form homodimers, whereas members with two copies of the LAGLIDADG (SEQ ID NO: 11) motif are found as monomers.

[0013] Methods for producing engineered, site-specific recombinant meganucleases are known in the art. I-CreI (SEQ ID NO: 10) is a member of the LAGLIDADG (SEQ ID NO: 11) family of homing endonucleases which recognizes and cuts a 22 base pair recognition sequence in the chloroplast chromosome of the algae Chlamydomonas reinhardtii. Genetic selection techniques have been used to modify the wild-type I-CreI cleavage site preference (Sussman et al. (2004), J. Mol. Biol. 342: 31-41; Chames et al. (2005), Nucleic Acids Res. 33: e178; Seligman et al. (2002), Nucleic Acids Res. 30: 3870-9, Arnould et al. (2006), J. Mol. Biol. 355: 443-58). More recently, a method of rationally-designing mono-LAGLIDADG (SEQ ID NO: 11) homing endonucleases was described which is capable of comprehensively redesigning I-CreI and other homing endonucleases to target widely-divergent DNA sites, including sites in mammalian, yeast, plant, bacterial, and viral genomes (WO 2007/047859).

[0014] As first described in WO 2009/059195, I-CreI and its engineered derivatives are normally dimeric but can be fused into a single polypeptide using a short peptide linker that joins the C-terminus of a first subunit to the N-terminus of a second subunit (Li, et al. (2009) Nucleic Acids Res. 37:1650-62; Grizot, et al. (2009) Nucleic Acids Res. 37:5405-19.) Thus, a functional “single-chain” meganuclease can be expressed from a single transcript. Such engineered meganucleases exhibit an extremely low frequency of off-target cutting. By delivering a gene encoding a single-chain meganuclease to a cell, it is possible to specifically and preferentially target, cleave, and disrupt the beta-2 microglobulin gene.

[0015] The use of engineered meganucleases for cleaving DNA targets in the human beta-2 microglobulin gene was previously disclosed in International Publication Nos. WO 2008/102199 (“the '199 application”) and WO 2008/102274 (“the '274 application”). The '199 application and the '274 application each disclose I-CreI variants having amino acid substitutions that are intended to increase selectivity of the meganuclease for recognition sequences found in the beta-2 microglobulin gene. However, the meganucleases described were only shown to have activity against beta-2 microglobulin DNA targets in yeast or CHO reporter cell systems. The present disclosure improves upon the teachings of the prior art by providing recombinant meganucleases that efficiently target and cleave recognition sequences in the beta-2 microglobulin gene in human T cells.

[0016] Thus, in one aspect, the disclosure provides a recombinant meganuclease that recognizes and cleaves a recognition sequence within the human beta-2 microglobulin gene (SEQ ID NO: 1). Such a recombinant meganuclease comprises a first subunit and a second subunit, wherein the first subunit binds to a first recognition half-site of the recognition sequence and comprises a first hypervariable (HVR1) region, and wherein the second subunit binds to a second recognition half-site of the recognition sequence and comprises a second hypervariable (HVR2) region.

[0017] In one embodiment, the recognition sequence comprises SEQ ID NO:2 (i.e., the B2M 13-14 recognition sequence).

[0018] In one such embodiment, the first meganuclease subunit comprises an amino acid sequence having at least 80%, at least 85%, at least 90%, or at least 95% sequence identity to residues 198-344 of any one of SEQ ID NOs:12-96 or residues 7-153 of any one of SEQ ID NOs:97-100, and the second meganuclease subunit comprises an amino acid sequence having at least 80%, at least 85%, at least 90%, or at least 95% sequence identity to residues 7-153 of any one of SEQ ID NOs: 12-96 or residues 198-344 of any one of SEQ ID NOs:97-100.

[0019] In another such embodiment, the HVR1 region comprises Y at a position corresponding to: (a) position 215 of any one of SEQ ID NOs: 12-96; or (b) position 24 of any one of SEQ ID NOs:97-100. In another such embodiment, the HVR1 region comprises F at a position corresponding to: (a) position 261 of any one of SEQ ID NOs: 12-96; or (b) position 70 of any one of SEQ ID NOs:97-100. In another such embodiment, the HVR1 region comprises one or more of Y and F at positions corresponding to: (a) positions 215 and 261, respectively, of any one of SEQ ID NOs: 12-96; or (b) positions 24 and 70, respectively, of any one of SEQ ID NOs:97-100.

[0020] In another such embodiment, the HVR2 region comprises Y at a position corresponding to: (a) position 24 of any one of SEQ ID NOs: 12-96; or (b) position 215 of any one of SEQ ID NOs:97-100. In another such embodiment, the HVR2 region comprises Y at a position corresponding to: (a) position 42 of any one of SEQ ID NOs: 12-96; or (b) position 233 of any one of SEQ ID NOs:97-100. In another such embodiment, the HVR2 region comprises one or more of Y and Y at positions corresponding to: (a) positions 24 and 42, respectively, of any one of SEQ ID NOs:97-100; or (b) positions 215 and 233, respectively, of any one of SEQ ID NOs:97-100.

[0021] In another such embodiment, the HVR1 region comprises residues 215-270 of any one of SEQ ID NOs: 12-96 or residues 24-79 of any one of SEQ ID NOs:97-100. In another such embodiment, the HVR2 region comprises residues 24-79 of any one of SEQ ID NOs: 12-96 or residues 215-270 of any one of SEQ ID NOs:97-100.

[0022] In another such embodiment, the first meganuclease subunit comprises residues 198-344 of any one of SEQ ID NOs:12-96 or residues 7-153 of any one of SEQ ID NOs:97-100. In another such embodiment, the second meganuclease subunit comprises residues 7-153 of any one of SEQ ID NOs:12-96 or residues 198-344 of any one of SEQ ID NOs:97-100.

[0023] In another such embodiment, the recombinant meganuclease is a single-chain meganuclease comprising a linker, wherein the linker covalently joins the first subunit and the second subunit.

[0024] In another such embodiment, the recombinant meganuclease comprises the amino acid sequence of any one of SEQ ID NOs: 12-100.

[0025] In a further embodiment, the recognition sequence comprises SEQ ID NO:4 (i.e., the B2M 5-6 recognition sequence).

[0026] In one such embodiment, the first meganuclease subunit comprises an amino acid sequence having at least 80%, at least 85%, at least 90%, or at least 95% sequence identity to residues 7-153 of any one of SEQ ID NOs:101-111 or residues 198-344 of any one of SEQ ID NOs: 112 or 113, and the second meganuclease subunit comprises an amino acid sequence having at least 80%, at least 85%, at least 90%, or at least 95% sequence identity to residues 198-344 of any one of SEQ ID NOs:101-111 or residues 7-153 of any one of SEQ ID NOs:112 or 113.

[0027] In another such embodiment, the HVR1 region comprises Y at a position corresponding to: (a) position 24 of any one of SEQ ID NOs:101-111; or (b) position 215 of any one of SEQ ID NOs:112 or 113.

[0028] In another such embodiment, the HVR2 region comprises Y at a position corresponding to: (a) position 215 of any one of SEQ ID NOs:101-111; or (b) position 24 of any one of SEQ ID NOs: 112 or 113. In another such embodiment, the HVR2 region comprises W at a position corresponding to: (a) position 233 of any one of SEQ ID NOs:101-111; or (b) position 42 of any one of SEQ ID NOs:112 or 113. In another such embodiment, the HVR2 region comprises one or more of Y and W at positions corresponding to: (a) positions 215 and 233, respectively, of any one of SEQ ID NOs: 101-111; or (b) positions 24 and 42, respectively, of any one of SEQ ID NOs: 112 or 113.

[0029] In another such embodiment, the HVR1 region comprises residues 24-79 of any one of SEQ ID NOs:101-111 or residues 215-270 of any one of SEQ ID NOs: 112 or 113. In another such embodiment, the HVR2 region comprises residues 215-270 of any one of SEQ ID NOs:101-111 or residues 24-79 of any one of SEQ ID NOs:112 or 113.

[0030] In another such embodiment, the first meganuclease subunit comprises residues 7-153 of any one of SEQ ID NOs:101-111 or residues 198-344 of any one of SEQ ID NOs:112 or 113. In another such embodiment, the second meganuclease subunit comprises residues 198-344 of any one of SEQ ID NOs: 101-111 or residues 7-153 of any one of SEQ ID NOs:112 or 113.

[0031] In another such embodiment, the recombinant meganuclease is a single-chain meganuclease comprising a linker, wherein the linker covalently joins the first subunit and the second subunit.

[0032] In another such embodiment, the recombinant meganuclease comprises the amino acid sequence of any one of SEQ ID NOs:101-113.

[0033] In a further embodiment, the recognition sequence comprises SEQ ID NO:6 (i.e., the B2M 7-8 recognition sequence).

[0034] In one such embodiment, the first meganuclease subunit comprises an amino acid sequence having at least 80%, at least 85%, at least 90%, or at least 95% sequence identity to residues 7-153 of any one of SEQ ID NOs:114-118 or residues 198-344 of any one of SEQ ID NOs: 119-124, and the second meganuclease subunit comprises an amino acid sequence having at least 80%, at least 85%, at least 90%, or at least 95% sequence identity to residues 198-344 of any one of SEQ ID NOs:114-118 or residues 7-153 of any one of SEQ ID NOs: 119-124.

[0035] In another such embodiment, the HVR1 region comprises S at a position corresponding to: (a) position 44 of any one of SEQ ID NOs:114-118; or (b) position 235 of any one of SEQ ID NOs: 119-124. In another such embodiment, the HVR1 region comprises F at a position corresponding to: (a) position 46 of any one of SEQ ID NOs: 114-118; or (b) position 237 of any one of SEQ ID NOs: 119-124. In another such embodiment, the HVR1 region comprises one or more of S and F at positions corresponding to: (a) positions 44 and 46, respectively, of any one of SEQ ID NOs: 114-118; or (b) positions 235 and 237, respectively, of any one of SEQ ID NOs:119-124.

[0036] In another such embodiment, the HVR2 region comprises Y at a position corresponding to: (a) position 215 of any one of SEQ ID NOs:114-118; or (b) position 24 of any one of SEQ ID NOs: 119-124.

[0037] In another such embodiment, the HVR1 region comprises residues 24-79 of any one of SEQ ID NOs: 114-118 or residues 215-270 of any one of SEQ ID NOs:119-124. In another such embodiment, the HVR2 region comprises residues 215-270 of any one of SEQ ID NOs: 114-118 or residues 24-79 of any one of SEQ ID NOs: 119-124.

[0038] In another such embodiment, the first meganuclease subunit comprises residues 7-153 of any one of SEQ ID NOs:114-118 or residues 198-344 of any one of SEQ ID NOs:119-124. In another such embodiment, the second meganuclease subunit comprises residues 198-344 of any one of SEQ ID NOs: 114-118 or residues 7-153 of any one of SEQ ID NOs: 119-124.

[0039] In another such embodiment, the recombinant meganuclease is a single-chain meganuclease comprising a linker, wherein the linker covalently joins the first subunit and the second subunit.

[0040] In another such embodiment, the recombinant meganuclease comprises the amino acid sequence of any one of SEQ ID NOs: 114-124.

[0041] In a further embodiment, the recognition sequence comprises SEQ ID NO:8 (i.e., the B2M 11-12 recognition sequence).

[0042] In one such embodiment, the first meganuclease subunit comprises an amino acid sequence having at least 80%, at least 85%, at least 90%, or at least 95% sequence identity to residues 7-153 of SEQ ID NO: 125 or residues 198-344 of SEQ ID NO: 126, and the second meganuclease subunit comprises an amino acid sequence having at least 80%, at least 85%, at least 90%, or at least 95% sequence identity to residues 198-344 of SEQ ID NO:125 or residues 7-153 of SEQ ID NO: 126.

[0043] In another such embodiment, the HVR1 region comprises Y at a position corresponding to: (a) position 24 of SEQ ID NO: 125; or (b) position 215 of SEQ ID NO: 126. In another such embodiment, the HVR1 region comprises W at a position corresponding to: (a) position 28 of SEQ ID NO: 125; or (b) position 219 of SEQ ID NO: 126. In another such embodiment, the HVR1 region comprises G at a position corresponding to: (a) position 42 of SEQ ID NO: 125; or (b) position 233 of SEQ ID NO: 126. In another such embodiment, the HVR1 region comprises one or more of Y, W, and G at positions corresponding to: (a) positions 24, 28, and 42, respectively, of SEQ ID NO:125; or (b) positions 215, 219, and 233, respectively, of SEQ ID NO: 126.

[0044] In another such embodiment, the HVR2 region comprises V at a position corresponding to: (a) position 233 of SEQ ID NO: 125; or (b) position 42 of SEQ ID NO: 126.

[0045] In another such embodiment, the HVR1 region comprises residues 24-79 of SEQ ID NO: 125 or residues 215-270 of SEQ ID NO: 126. In another such embodiment, the HVR2 region comprises residues 215-270 of SEQ ID NO: 125 or residues 24-79 of SEQ ID NO: 126.

[0046] In another such embodiment, the first meganuclease subunit comprises residues 7-153 of SEQ ID NO: 125 or residues 198-344 of SEQ ID NO: 126. In another such embodiment, the second meganuclease subunit comprises residues 198-344 of SEQ ID NO:125 or residues 7-153 of SEQ ID NO: 126.

[0047] In another such embodiment, the recombinant meganuclease is a single-chain meganuclease comprising a linker, wherein the linker covalently joins the first subunit and the second subunit.

[0048] In another such embodiment, the recombinant meganuclease comprises the amino acid sequence of any one of SEQ ID NOs: 125 and 126.

[0049] In another aspect, the present disclosure provides an isolated polynucleotide comprising a nucleic acid sequence encoding a recombinant meganuclease described herein.

[0050] In the various aspects of the present disclosure, the polynucleotide is an mRNA. In one embodiment, the mRNA can encode a single recombinant meganuclease described herein. In other embodiments, the mRNA is a polycistronic mRNA (e.g., bicistronic, tricistronic, etc.) encoding at least one meganuclease described herein and one additional gene. In particular embodiments, a polycistronic mRNA can encode two or more meganucleases of the present disclosure which target different recognition sequences within the same gene. In other embodiments, a polycistronic mRNA can encode a meganuclease described herein and a second nuclease which targets a different recognition sequence within the same gene or, alternatively, targets a different recognition sequence within another gene. In a specific embodiment, a polycistronic mRNA can encode a meganuclease described herein which recognizes and cleaves a B2M recognition sequence described herein and a nuclease which recognizes and cleaves a recognition sequence within the T cell receptor alpha constant region.

[0051] In another aspect, the present disclosure provides a recombinant DNA construct comprising an isolated polynucleotide, wherein the isolated polynucleotide comprises a nucleic acid sequence encoding a recombinant meganuclease described herein. In one embodiment, the recombinant DNA construct encodes a viral vector. In some embodiments, the viral vector can be a retroviral vector, a lentiviral vector, an adenoviral vector, or an adeno-associated viral (AAV) vector. In a particular embodiment, the viral vector is a recombinant AAV vector.

[0052] In another aspect, the present disclosure provides a viral vector comprising an isolated polynucleotide, wherein the isolated polynucleotide comprises a nucleic acid sequence encoding a recombinant meganuclease described herein. In one embodiment, the viral vector is a retroviral vector, a lentiviral vector, an adenoviral vector, or an AAV vector. In a particular embodiment, the viral vector is a recombinant AAV vector.

[0053] In another aspect, the present disclosure provides a method for producing a genetically-modified eukaryotic cell comprising an exogenous sequence of interest inserted in a chromosome of the eukaryotic cell, the method comprising transfecting a eukaryotic cell with one or more nucleic acids including: (a) a nucleic acid sequence encoding a recombinant meganuclease described herein; and (b) a nucleic acid sequence comprising the sequence of interest; wherein the recombinant meganuclease produces a cleavage site in the chromosome at a recognition sequence comprising SEQ ID NO:2, SEQ ID NO:4, SEQ ID NO:6, or SEQ ID NO:8, and wherein the sequence of interest is inserted into the chromosome at the cleavage site.

[0054] In one embodiment of the method, cell-surface expression of beta-2 microglobulin is reduced when compared to a control cell.

[0055] In another embodiment of the method, the genetically-modified cell exhibits reduced alloreactivity and/or reduced allogenicity when introduced into a host or when administered to a subject, as compared to a control cell.

[0056] In another embodiment of the method, the nucleic acid comprising the sequence of interest further comprises sequences homologous to sequences flanking the cleavage site, and the sequence of interest is inserted at the cleavage site by homologous recombination.

[0057] In another embodiment of the method, the nucleic acid comprising the sequence of interest lacks substantial homology to the cleavage site, and the sequence of interest is inserted into the chromosome by non-homologous end-joining.

[0058] In another embodiment of the method, the sequence of interest encodes a chimeric antigen receptor. In another embodiment of the method, the sequence of interest encodes an exogenous T cell receptor.

[0059] In another embodiment of the method, at least the nucleic acid comprising the sequence of interest is introduced into the eukaryotic cell by a viral vector. In another embodiment of the method, the nucleic acid sequence encoding the recombinant meganuclease and the nucleic acid sequence encoding the sequence of interest are introduced into the eukaryotic cell by the same viral vector or, alternatively, by separate viral vectors. In some embodiments of the method, the viral vector is a retroviral vector, a lentiviral vector, an adenoviral vector, or an AAV vector. In particular embodiments of the method, the viral vector is a recombinant AAV vector.

[0060] In another embodiment of the method, at least the nucleic acid encoding the sequence of interest is introduced into the eukaryotic cell using a single-stranded DNA template.

[0061] In another embodiment of the method, the eukaryotic cell is a human T cell, or a cell derived therefrom.

[0062] In another embodiment of the method, the eukaryotic cell has been genetically-modified to exhibit reduced cell-surface expression of an endogenous T cell receptor when compared to a control cell.

[0063] In another aspect, the method can further comprise: (a) transfecting the eukaryotic cell with a nucleic acid encoding an endonuclease which recognizes and cleaves a second recognition sequence; or (b) introducing into the eukaryotic cell an endonuclease which recognizes and cleaves a second recognition sequence; wherein the second recognition sequence is located in a gene encoding a component of an endogenous T cell receptor, and wherein the genetically-modified eukaryotic cell exhibits reduced cell-surface expression of beta-2 microglobulin and the endogenous T cell receptor when compared to a control cell.

[0064] In one such embodiment, the endonuclease is a recombinant meganuclease. In another such embodiment, the second recognition sequence is located in the human T cell receptor alpha constant region gene, as set forth in SEQ ID NO: 127. In another such embodiment, the second recognition sequence can comprise SEQ ID NO: 128, 129, or 130 (i.e., the TRC 1-2, TRC 3-4, and TRC 5-6 recognition sequences, respectively).

[0065] In another such embodiment, the nucleic acid is a polycistronic mRNA which encodes both a recombinant meganuclease described herein and the endonuclease which recognizes and cleaves a second recognition sequence.

[0066] In another aspect, the present disclosure provides a method for producing a genetically-modified eukaryotic cell comprising an exogenous sequence of interest inserted in a chromosome of the eukaryotic cell, the method comprising: (a) introducing a recombinant meganuclease described herein into a eukaryotic cell; and (b) transfecting the eukaryotic cell with a nucleic acid comprising a sequence of interest; wherein the recombinant meganuclease produces a cleavage site in the chromosome at a recognition sequence comprising SEQ ID NO:2, SEQ ID NO:4, SEQ ID NO:6, or SEQ ID NO:8, and wherein the sequence of interest is inserted into the chromosome at the cleavage site.

[0067] In one embodiment of the method, cell-surface expression of beta-2 microglobulin is reduced when compared to a control cell.

[0068] In another embodiment of the method, the genetically-modified cell exhibits reduced alloreactivity and/or reduced allogenicity when introduced into a host or when administered to a subject, as compared to a control cell.

[0069] In another embodiment of the method, the nucleic acid comprising the sequence of interest further comprises sequences homologous to sequences flanking the cleavage site, and the sequence of interest is inserted at the cleavage site by homologous recombination.

[0070] In another embodiment of the method, the nucleic acid comprising the sequence of interest lacks substantial homology to the cleavage site, and the sequence of interest is inserted into the chromosome by non-homologous end-joining.

[0071] In another embodiment of the method, the sequence of interest encodes a chimeric antigen receptor. In another embodiment of the method, the sequence of interest encodes an exogenous T cell receptor.

[0072] In another embodiment of the method, the nucleic acid comprising the sequence of interest is introduced into the eukaryotic cell by a viral vector. In some embodiments of the method, the viral vector is a retroviral vector, a lentiviral vector, an adenoviral vector, or an AAV vector. In particular embodiments, the viral vector is a recombinant AAV vector.

[0073] In another embodiment of the method, the nucleic acid encoding the sequence of interest is introduced into the eukaryotic cell using a single-stranded DNA template.

[0074] In another embodiment of the method, the eukaryotic cell is a human T cell, or a cell derived therefrom.

[0075] In another embodiment of the method, the eukaryotic cell has been genetically-modified to exhibit reduced cell-surface expression of an endogenous T cell receptor when compared to a control cell.

[0076] In another embodiment, the method can further comprise: (a) transfecting the eukaryotic cell with a nucleic acid encoding an endonuclease which recognizes and cleaves a second recognition sequence; or (b) introducing into the eukaryotic cell an endonuclease which recognizes and cleaves a second recognition sequence; wherein the second recognition sequence is located in a gene encoding a component of an endogenous T cell receptor, and wherein the genetically-modified eukaryotic cell exhibits reduced cell-surface expression of beta-2 microglobulin and the endogenous T cell receptor when compared to a control cell.

[0077] In one such embodiment, the endonuclease is a recombinant meganuclease. In another such embodiment, the second recognition sequence is located in the human T cell receptor alpha constant region gene, as set forth in SEQ ID NO: 127. In another such embodiment, the second recognition sequence can comprise SEQ ID NO: 128, 129, or 130 (i.e., the TRC 1-2, TRC 3-4, and TRC 5-6 recognition sequences, respectively).

[0078] In another aspect, the present disclosure provides a method for producing a genetically-modified eukaryotic cell by disrupting a target sequence in a chromosome of the eukaryotic cell, the method comprising: transfecting the eukaryotic cell with a nucleic acid encoding a recombinant meganuclease described herein or, alternatively, introducing a recombinant meganuclease described herein into the eukaryotic cell; wherein the meganuclease produces a cleavage site in the chromosome at a recognition sequence comprising SEQ ID NO:2, SEQ ID NO:4, SEQ ID NO:6, or SEQ ID NO:8, and wherein the target sequence is disrupted by non-homologous end-joining at the cleavage site. In such a method, the genetically-modified eukaryotic cell exhibits reduced cell-surface expression of beta-2 microglobulin when compared to a control cell.

[0079] In one embodiment of the method, the genetically-modified cell exhibits reduced alloreactivity and/or reduced allogenicity when introduced into a host or when administered to a subject, as compared to a control cell.

[0080] In another embodiment of the method, the eukaryotic cell is a human T cell, or a cell derived therefrom.

[0081] In another embodiment of the method, the eukaryotic cell has been genetically-modified to exhibit reduced cell-surface expression of an endogenous T cell receptor when compared to a control cell.

[0082] In another embodiment the method further comprises: (a) transfecting the eukaryotic cell with a nucleic acid encoding an endonuclease which recognizes and cleaves a second recognition sequence; or (b) introducing into the eukaryotic cell an endonuclease which recognizes and cleaves a second recognition sequence. In such an embodiment, the endonuclease is a recombinant meganuclease. In another such embodiment, the second recognition sequence is located in a gene encoding a component of an endogenous T cell receptor, and the genetically-modified eukaryotic cell exhibits reduced cell-surface expression of both beta-2 microglobulin and the endogenous T cell receptor when compared to a control cell.

[0083] In such an embodiment, the nucleic acid is a polycistronic mRNA which encodes both a recombinant meganuclease described herein and the endonuclease which recognizes and cleaves a second recognition sequence.

[0084] In another embodiment of the method, the eukaryotic cell expresses a cell-surface chimeric antigen receptor. In another embodiment of the method, the sequence of interest encodes an exogenous T cell receptor.

[0085] In another embodiment, the method further comprises transfecting the eukaryotic cell with a nucleic acid comprising an exogenous sequence of interest. In such an embodiment, the nucleic acid comprising the exogenous sequence of interest further comprises sequences homologous to sequences flanking the second cleavage site, and the sequence of interest is inserted at the second cleavage site by homologous recombination. In another such embodiment, the nucleic acid comprising the sequence of interest lacks substantial homology to the cleavage site, and the sequence of interest is inserted into the chromosome by non-homologous end-joining.

[0086] In another such embodiment, the exogenous sequence of interest encodes a chimeric antigen receptor. In another such embodiment, the exogenous of interest encodes an exogenous T cell receptor.

[0087] In another such embodiment, at least the nucleic acid comprising the exogenous sequence of interest is introduced into the eukaryotic cell by a viral vector. In another such embodiment, the nucleic acid sequence encoding the endonuclease and the nucleic acid sequence encoding the sequence of interest are introduced into the eukaryotic cell by the same viral vector or, alternatively, by separate viral vectors. In some embodiments, the viral vector is a retroviral vector, a lentiviral vector, an adenoviral vector, or an AAV vector. In a particular embodiment, the viral vector is a recombinant AAV vector.

[0088] In another such embodiment, the nucleic acid encoding the sequence of interest is introduced into the eukaryotic cell using a single-stranded DNA template.

[0089] In another aspect, the present disclosure provides a method of producing a genetically-modified non-human organism comprising: producing a genetically-modified non-human eukaryotic cell according to the methods described herein; and (b) growing the genetically-modified non-human eukaryotic cell to produce the genetically-modified non-human organism.

[0090] In one embodiment of the method, the non-human eukaryotic cell is selected from the group consisting of a gamete, a zygote, a blastocyst cell, an embryonic stem cell, and a protoplast cell.

[0091] In another aspect, the present disclosure provides a genetically-modified cell comprising in its genome a modified human beta-2 microglobulin gene, wherein the modified beta-2 microglobulin gene comprises from 5′ to 3′: (a) a 5′ region of the human beta-2 microglobulin gene; (b) an exogenous polynucleotide; and (c) a 3′ region of the human beta-2 microglobulin gene. The genetically-modified cell can be a genetically-modified human T cell or a genetically-modified cell derived from a human T cell. Further, the genetically-modified cell can have reduced cell-surface expression of beta-2 microglobulin when compared to an unmodified control cell.

[0092] In one embodiment, the exogenous polynucleotide comprises a nucleic acid sequence encoding a chimeric antigen receptor, wherein the chimeric antigen receptor comprises an extracellular ligand-binding domain and one or more intracellular signaling domains.

[0093] In another embodiment, the exogenous polynucleotide is inserted into the beta-2 microglobulin gene at a position within a recognition sequence comprising SEQ ID NO:2 (i.e., the B2M 13-14 recognition sequence), SEQ ID NO:4 (i.e., the B2M 5-6 recognition sequence), SEQ ID NO:6 (i.e., the B2M 7-8 recognition sequence), or SEQ ID NO:8 (i.e., the B2M 11-12 recognition sequence).

[0094] In another aspect, the present disclosure provides a genetically-modified eukaryotic cell described herein for use as a medicament. The present disclosure further provides the use of a genetically-modified eukaryotic cell described herein in the manufacture of a medicament for treating a disease in a subject in need thereof. In one such embodiment, the medicament is useful in the treatment of cancer. In another embodiment, the medicament is useful in the treatment of cancer using immunotherapy.

[0095] In another aspect, the present disclosure provides a population of genetically-modified eukaryotic cells. In one embodiment, the population comprises at least 1×10⁶, 2×10⁶, 5×10⁶, 1×10⁹, 2×10⁹, 5×10⁹, or more, genetically-modified eukaryotic cells.

[0096] In another embodiment, at least 80%, at least 85%, at least 90%, at least 95%, or more of the genetically-modified eukaryotic cells in the population exhibit reduced cell-surface expression of an endogenous T cell receptor when compared to a control cell, and at least 80%, at least 85%, at least 90%, at least 95%, or more of the genetically-modified eukaryotic cells exhibit reduced cell-surface expression of beta-2 microglobulin when compared to a control cell.

[0097] In another embodiment, at least 20%, at least 25%, at least 30%, at least 35%, at least 40%, at least 45%, at least 50%, at least 55%, at least 60%, at least 65%, at least 70%, at least 75%, at least 80%, at least 85%, at least 90%, at least 95%, or more of the eukaryotic cells express a chimeric antigen receptor.

[0098] In another embodiment, the genetically-modified eukaryotic cells are genetically-modified T cells, or cells derived therefrom.

[0099] In another aspect, the present disclosure provides a pharmaceutical composition comprising a genetically-modified eukaryotic cell, or a population of genetically-modified eukaryotic cells, described herein and a pharmaceutically acceptable carrier. In one embodiment, the genetically-modified eukaryotic cells are genetically-modified T cells, or cells derived therefrom. In particular embodiments, the genetically-modified T cells express a chimeric antigen receptor and exhibit reduced cell surface expression of beta-2 microglobulin and an endogenous T cell receptor. Such pharmaceutical compositions of the disclosure are suitable for use as immunotherapy for the treatment of cancer.

[0100] In further aspects, the genetically-modified T cells exhibit reduced alloreactivity and/or reduced allogenicity when introduced into a host or when administered to a subject, as compared to control cells.

[0101] In another aspect, the present disclosure provides a method for treating cancer in a subject in need thereof, the method comprising administering to the subject a pharmaceutical composition described herein. Such a method represents immunotherapy for the treatment of cancer.

[0102] In some embodiments, a chimeric antigen receptor disclosed herein comprises at least an extracellular ligand-binding domain or moiety and an intracellular domain that comprises one or more signaling domains and/or co-stimulatory domains. In some embodiments, the extracellular ligand-binding domain or moiety is in the form of a single-chain variable fragment (scFv) derived from a monoclonal antibody, which provides specificity for a particular epitope or antigen (e.g., an epitope or antigen preferentially present on the surface of a cell, such as a cancer cell or other disease-causing cell or particle). The scFv is attached via a linker sequence. The extracellular ligand-binding domain is specific for any antigen or epitope of interest. In some embodiments, the scFv is humanized or fully human. The extracellular domain of a chimeric antigen receptor can also comprise an autoantigen (see, Payne et al. (2016) Science, Vol. 353 (6295): 179-184), which is recognized by autoantigen-specific B cell receptors on B lymphocytes, thus directing T cells to specifically target and kill autoreactive B lymphocytes in antibody-mediated autoimmune diseases. Such CARs are referred to as chimeric autoantibody receptors (CAARs), and their use is encompassed by the present disclosure.

[0103] The foregoing and other aspects and embodiments of the present disclosure can be more fully understood by reference to the following detailed description and claims. Certain features of the disclosure, which are, for clarity, described in the context of separate embodiments, may also be provided in combination in a single embodiment. All combinations of the embodiments are specifically embraced by the present disclosure and are disclosed herein just as if each and every combination was individually and explicitly disclosed. Conversely, various features of the disclosure, which are, for brevity, described in the context of a single embodiment, may also be provided separately or in any suitable sub-combination. All sub-combinations of features listed in the embodiments are also specifically embraced by the present disclosure and are disclosed herein just as if each and every such sub-combination was individually and explicitly disclosed herein. Embodiments of each aspect of the present disclosure disclosed herein apply to each other aspect of the disclosure mutatis mutandis.

### BRIEF DESCRIPTION OF THE FIGURES

[0104] FIG. 1. B2M recognition sequences in the human beta-2 microglobulin gene. Each recognition sequence targeted by a recombinant meganuclease of the disclosure comprises two recognition half-sites. Each recognition half-site comprises 9 base pairs, separated by a 4 base pair central sequence. The B2M 13-14 recognition sequence (SEQ ID NO:2) spans nucleotides 9115-9136 of the human beta-2 microglobulin gene (SEQ ID NO:1), and comprises two recognition half-sites referred to as B2M13 and B2M14. The B2M 5-6 recognition sequence (SEQ ID NO:4) spans nucleotides 8951-8972 of the human beta-2 microglobulin gene (SEQ ID NO: 1), and comprises two recognition half-sites referred to as B2M5 and B2M6. The B2M 7-8 recognition sequence (SEQ ID NO:6) spans nucleotides 9182-9203 of the human beta-2 microglobulin gene (SEQ ID NO:1), and comprises two recognition half-sites referred to as B2M7 and B2M8. The B2M 11-12 recognition sequence (SEQ ID NO:8) spans nucleotides 5057-5078 of the human beta-2 microglobulin gene (SEQ ID NO: 1), and comprises two recognition half-sites referred to as B2M11 and B2M12.

[0105] FIG. 2. The recombinant meganucleases of the disclosure comprise two subunits, wherein the first subunit comprising the HVR1 region binds to a first recognition half-site (e.g., B2M13, B2M5, B2M7, or B2M11) and the second subunit comprising the HVR2 region binds to a second recognition half-site (e.g., B2M14, B2M6, B2M8, or B2M12). In embodiments where the recombinant meganuclease is a single-chain meganuclease, the first subunit comprising the HVR1 region can be positioned as either the N-terminal or C-terminal subunit. Likewise, the second subunit comprising the HVR2 region can be positioned as either the N-terminal or C-terminal subunit.

[0106] FIG. 3. Schematic of reporter assay in CHO cells for evaluating recombinant meganucleases targeting recognition sequences found in the beta-2 microglobulin gene (SEQ ID NO: 1). For the recombinant meganucleases described herein, a CHO cell line was produced in which a reporter cassette was integrated stably into the genome of the cell. The reporter cassette comprised, in 5′ to 3′ order: an SV40 Early Promoter; the 5′ ⅔ of the GFP gene; the recognition sequence for an engineered meganuclease of the disclosure (e.g., the B2M 13-14 recognition sequence, the B2M 5-6 recognition sequence, the B2M 7-8 recognition sequence, or the B2M 11-12 recognition sequence); the recognition sequence for the CHO-23/24 meganuclease (WO/2012/167192); and the 3′ ⅔ of the GFP gene. Cells stably transfected with this cassette did not express GFP in the absence of a DNA break-inducing agent. Meganucleases were introduced by transduction of plasmid DNA or mRNA encoding each meganuclease. When a DNA break was induced at either of the meganuclease recognition sequences, the duplicated regions of the GFP gene recombined with one another to produce a functional GFP gene. The percentage of GFP-expressing cells could then be determined by flow cytometry as an indirect measure of the frequency of genome cleavage by the meganucleases.

[0107] FIGS. 4A-4J. Efficiency of recombinant meganucleases for recognizing and cleaving recognition sequences in the human beta-2 microglobulin gene (SEQ ID NO: 1) in a CHO cell reporter assay. Each of the recombinant meganucleases set forth in SEQ ID NOs: 12-126 were engineered to target the B2M 13-14 recognition sequence (SEQ ID NO:2), the B2M 5-6 recognition sequence (SEQ ID NO:4), the B2M 7-8 recognition sequence (SEQ ID NO:6), or the B2M 11-12 recognition sequence (SEQ ID NO:8), and were screened for efficacy in the CHO cell reporter assay. The results shown provide the percentage of GFP-expressing cells observed in each assay, which indicates the efficacy of each meganuclease for cleaving a beta-2 microglobulin target recognition sequence or the CHO-23/24 recognition sequence. A negative control (B2M bs) was further included in each assay. A) Meganucleases targeting the B2M 5-6 recognition sequence. B) Meganucleases targeting the B2M 7-8 recognition sequence. C) Meganucleases targeting the B2M 11-12 recognition sequence. D)-J) Meganucleases targeting the B2M 13-14 recognition sequence.

[0108] FIGS. 5A-5N. Efficiency of recombinant B2M 13-14 meganucleases for inhibiting cell-surface expression of beta-2 microglobulin in human T cells. 5A-5N) Donor CD3⁺ human T cells were stimulated with anti-CD3 and anti-CD28 antibodies for 3 days, then electroporated with mRNA encoding a given B2M 13-14 meganuclease. As a positive control, cells were mock electroporated. In an additional control for electroporation efficiency, cells were electroporated with mRNA encoding GFP. At 3 days post-electroporation, cells were stained with an antibody recognizing beta-2 microglobulin and analyzed by flow cytometry.

[0109] FIGS. 6A-6J. Efficiency of recombinant B2M 13-14 meganucleases for inhibiting cell-surface expression of beta-2 microglobulin in human T cells. Additional B2M 13-14 meganucleases were engineered in which the first meganuclease subunit remained the same as in B2M 13-14×.93, but the second meganuclease subunit contained new amino acid substitutions at positions contacting the B2M 13-14 recognition sequence. 6A-6J) Donor CD3⁺ human T cells were stimulated with anti-CD3 and anti-CD28 antibodies for 3 days, then electroporated with mRNA encoding a given B2M 13-14 meganuclease (1 μg) using the Amaxa 4D-Nucleofector (Lonza) according to the manufacturer's instructions. B2M 13-14×.93 QE was included to allow for comparison to previous variants. At 6 days post-electroporation, cells were stained with an antibody recognizing beta-2 microglobulin as well as an antibody recognizing CD3. Data is presented by flow cytometry plots.

[0110] FIGS. 7A-7H. Efficiency of recombinant B2M 13-14 meganucleases for inhibiting cell-surface expression of beta-2 microglobulin in human T cells. Further B2M 13-14 meganucleases were generated and evaluated for their ability to eliminate cell-surface expression of beta-2 microglobulin on human T cells. These nucleases were based on B2M 13-14×.169. Amino acid substitutions were made in the first meganuclease subunit to introduce alternative base contacts, while the second meganuclease subunit remained the same as in B2M 13-14×.169. 7A-7H) Donor CD3⁺ human T cells were stimulated with anti-CD3 and anti-CD28 antibodies for 3 days, then electroporated with mRNA encoding a given B2M 13-14 meganuclease using the Amaxa 4D-Nucleofector. B2M 13-14×.202 was included to allow for comparison to previous variants shown in FIGS. 6A-6J. Cells were stained with an antibody recognizing beta-2 microglobulin as well as an antibody recognizing CD3. Flow cytometry data for the B2M 13-14 meganucleases that showed B2M knockout efficiency of >40% are shown.

[0111] FIGS. 8A-8D. Double knockout of beta-2 microglobulin and T cell receptor in human T cells by simultaneous nucleofection of two mRNAs encoding different meganucleases. Donor CD3⁺ human T cells were stimulated with anti-CD3 and anti-CD28 antibodies for 2 days, then co-electroporated with mRNA encoding B2M 13-14×.202 and mRNA encoding TRC 1-2×.87 EE using the Amaxa 4D-Nucleofector. As controls, human T cells were mock electroporated or electroporated with mRNA encoding a single meganuclease, either B2M 13-14×.202 or TRC 1-2×.87 EE. At 6 days post-electroporation, cells were stained with an antibody against CD3 and an antibody against B2M and analyzed by flow cytometry. A) Mock electroporated cells. B) TRC 1-2×.87 EE nucleofected cells. C) B2M 13-14×.202 nucleofected cells. D) Cells double nucleofected with B2M 13-14×.202 and TRC 1-2×.87 EE.

[0112] FIGS. 9A-9D. Double knockout of beta-2 microglobulin and T cell receptor in human T cells by simultaneous nucleofection of two mRNAs encoding different meganucleases. Donor CD3⁺ human T cells were stimulated with anti-CD3 and anti-CD28 antibodies for 2 days, then co-electroporated with mRNA encoding B2M 13-14×.169 and mRNA encoding TRC 1-2×.87 EE using the Amaxa 4D-Nucleofector. As controls, human T cells were mock electroporated or electroporated with mRNA encoding a single meganuclease, either B2M 13-14×.169 or TRC 1-2×.87 EE. At 6 days post-electroporation, cells were stained with an antibody against CD3 and an antibody against B2M and analyzed by flow cytometry. A) Mock nucleofected cells. B) TRC 1-2×.87 EE nucleofected cells. C) B2M 13-14×.169 nucleofected cells. D) Cells double nucleofected with B2M 13-14×.169 and TRC 1-2×.87 EE.

[0113] FIGS. 10A-10C. Double knockout of beta-2 microglobulin and T cell receptor in human T cells by sequential nucleofection. Donor CD3⁺ human T cells were stimulated with anti-CD3 and anti-CD28 antibodies for 3 days, then electroporated with mRNA encoding B2M 13-14×.93 QE using the Amaxa 4D-Nucleofector. At 4 days post-electroporation, B2M-negative cells were enriched using a biotinylated anti-B2M antibody and a human biotin selection cocktail kit. The B2M-negative enriched cells were re-stimulated with anti-CD3 and anti-CD28 antibodies for 3 days, then electroporated with mRNA encoding TRC 1-2×.87 EE using the Amaxa 4D-Nucleofector. At 5 days post-electroporation, cells were stained with antibodies against B2M and TCR and analyzed by flow cytometry. A) Mock nucleofected cells. B) B2M 13-14×.93 QE nucleofected cells. C) Cells double nucleofected with B2M 13-14×.93 QE and TRC 1-2×.87 EE.

[0114] FIGS. 11A-11C. Enrichment of a beta-2 microglobulin and T cell receptor double knockout population. Donor human peripheral blood mononuclear cells (PMBCs) were stimulated with anti-CD3 and anti-CD28 antibodies for 2 days, then electroporated with mRNA encoding B2M 13-14×.93 QE using the Amaxa 4D-Nucleofector. B2M-negative cells were enriched, re-stimulated with anti-CD3 and anti-CD28 antibodies for 3 days, and electroporated with mRNA encoding TRC 1-2×.87 EE. At 6 days post-electroporation, CD3-negative cells were enriched using a CD3 positive selection kit followed by another enrichment for B2M-negative cells using a biotinylated anti-B2M antibody and a biotin selection kit. Enriched cells were incubated 3 days in the presence of IL-2, IL-7 and IL-15, then stained with antibodies against B2M and CD3 and analyzed by flow cytometry. A) Non-nucleofected PBMCs stained with anti-CD3 antibody. B) Non-nucleofected PBMCs stained with anti-CD3 and anti-B2M antibodies. C) Enriched population of beta-2 microglobulin and T cell receptor double knock cells stained with anti-CD3 and anti-B2M antibodies.

[0115] FIGS. 12A-12H. Reduced allogenicity of B2M knockout T cells. The allogenicity of B2M knockout T cells was determined in a allogenic cytotoxicity assay using T cells from two donors (donor 36 and donor 75) and mismatched dendritic cells from another donor. Cytotoxicity was measured by VAD-FMK-FITC signal. A) Wild-type T cells; effector and donor cells from donor 36. B) Wild-type T cells; effector cells from donor 36, target cells from donor 75. C) Wild-type T cells; effector and donor cells from donor 75. D) Wild-type T cells; effector cells from donor 75, target cells from donor 36. E) B2M knockout T cells; effector and donor cells from donor 36. F) B2M knockout T cells; effector cells from donor 36, target cells from donor 75. G) B2M knockout T cells; effector and donor cells from donor 75. H) B2M knockout T cells; effector cells from donor 75, target cells from donor 36.

[0116] FIG. 13. Reduced allogenicity of B2M knockout T cells. Cytotoxicity determined by IFN-γ secretion as measured by ELISA.

[0117] FIG. 14. Reduced allogenicity of B2M knockout T cells. Cytotoxicity determined by LDH secretion.

[0118] FIGS. 15A-15N. Simultaneous knockout of TRC and B2M using bicistronic mRNA. Donor human T cells were electroporated with 1 μg of TRC 1-2×.87EE mRNA or B2M13-14×.479 RNA. An additional sample of cells was electroporated with 1 μg each of both individual nuclease mRNAs. As controls, human T cells were electroporated in the absence of mRNAs. At 3 and 7 days post-electroporation, cells that were electroporated with bicistronic mRNAs were stained with an antibody against CD3 (to determine TRC knockdown) and an antibody against B2M and analyzed by flow cytometry. A) Mock-treated. B) B2M 13-14×.479. C) TRC 1-2×.87 EE. D) TRC 1-2×.87 EE and B2M 13-14×.479. E) B2M-IRES-TRC. F) B2M-E2A-TRC. G) B2M-F2A-TRC. H) B2M-P2A-TRC. I) B2M-T2A-TRC. J) TRC-IRES-B2M. K) TRC-E2A-B2M. L) TRC-F2A-B2M. M) TRC-P2A-B2M. N) TRC-T2A-B2M.

[0119] FIGS. 16A-16P. Titration of bicistronic mRNA in T cells. B2M-IRES-TRC, B2M-T2A-TRC, TRC-P2A-B2M, or TRC-T2A-B2M mRNAs were introduced into donor human T cells at increasing concentrations, and the percent knockdown of cell-surface CD3 (indicated TRC knockdown) and B2M was determined. For comparison, donor human T cells were electroporated with 1 μg of TRC1-2×.87EE or 1 μg of B2M13-14×.479. In addition, donor human T cells were electroporated with both nucleases encoded on separate RNA molecules, using doses of 0.5 μg of each nuclease or 1 μg of each nuclease. As controls, human T cells were electroporated with no RNA. At 7 days post-electroporation, cells were enumerated and viability was assessed using trypan blue. Cells were stained with an antibody against CD3 (to determine TRC knockdown) and an antibody against B2M and analyzed by flow cytometry, as well as Ghost Dye 780 to exclude dead cells from analysis. A) B2M-IRES-TRC 1 μg. B) B2M-IRES-TRC 2 μg. C) B2M-IRES-TRC 4 μg. D) B2M-T2A-TRC 1 μg. E) B2M-T2A-TRC 2 μg. F) B2M-T2A-TRC 4 μg. G) TRC-P2A-B2M 1 μg. H) TRC-P2A-B2M 2 μg. I) TRC-P2A-B2M 4 μg. J) TRC-T2A-B2M 1 μg. K) TRC-T2A-B2M 2 μg. L) TRC-T2A-B2M 4 μg. M) TRC 1-2×.87 EE. N) B2M 13-14×.479. O) TRC 1-2×.87 EE 0.5 μg and B2M 13-14×.479 0.5 μg. P) TRC 1-2×.87 EE 1.0 μg and B2M 13-14×.479 1.0 μg.

[0120] FIGS. 17A-17H. Production of anti-CD19 CAR T cells using bicistronic mRNA and AAV. Bicistronic B2M-IRES-TRC was used in conjunction with an AAV vector to introduce an exogenous nucleic acid sequence, encoding a chimeric antigen receptor, into the genome of human T cells at the TRC 1-2 recognition sequence via homologous recombination, while simultaneously knocking out cell-surface expression of both the T cell receptor and B2M. The AAV vector comprised a nucleic acid comprising the anti-CD19 CAR coding sequence previously described, which was flanked by homology arms. Expression of the CAR cassette was driven by a JeT promoter. As controls, cells were electroporated with 1 μg of TRC 1-2×87EE RNA prior to AAV transduction. In addition, B2M-IRES-TRC and TRC 1-2×.87 EE electroporated cells were mock transduced. At 3 and 6 days post-electroporation/transduction, edited cells were stained with an antibody against CD3 (to determine TRC knockdown) and an antibody against B2M, as well as a biotinylated recombinant CD19-Fc fusion protein to detect the CAR. Streptavidin-PE was used as the secondary detection reagent for CAR staining. CD3, B2m, and CAR levels were assessed by flow cytometry. A) Staining for CD3 (X axis) and B2M (Y axis) after nucleofection with TRC 1-2×.87 EE. B) Staining for CD3 (X axis) and B2M (Y axis) after nucleofection with B2M-IRES-TRC. C) Staining for CD3 (X axis) and CAR (Y axis) after nucleofection with TRC 1-2×.87 EE and mock transduction. D) Staining for CD3 (X axis) and CAR (Y axis) after nucleofection with B2M-IRES-TRC and mock transduction. E) Staining for CD3 (X axis) and CAR (Y axis) after nucleofection with TRC 1-2×.87 EE and transduction with AAV. F) Staining for CD3 (X axis) and CAR (Y axis) after nucleofection with B2M-IRES-TRC and transduction with AAV. G) Staining for B2M in cells nucleofected with TRC 1-2×.87 EE and transduced with AAV. H) Staining for B2M in cells nucleofected with B2M-IRES-TRC and transduced with AAV.

### BRIEF DESCRIPTION OF THE SEQUENCES

[0121] SEQ ID NO: 1 sets forth the nucleic acid sequence of the human beta-2 microglobulin gene.

[0122] SEQ ID NO:2 sets forth the nucleic acid sequence of the B2M 13-14 recognition sequence (sense).

[0123] SEQ ID NO:3 sets forth the nucleic acid sequence of the B2M 13-14 recognition sequence (anti-sense).

[0124] SEQ ID NO:4 sets forth the nucleic acid sequence of the B2M 5-6 recognition sequence (sense).

[0125] SEQ ID NO:5 sets forth the nucleic acid sequence of the B2M 5-6 recognition sequence (anti-sense).

[0126] SEQ ID NO:6 sets forth the nucleic acid sequence of the B2M 7-8 recognition sequence (sense).

[0127] SEQ ID NO:7 sets forth the nucleic acid sequence of the B2M 7-8 recognition sequence (anti-sense).

[0128] SEQ ID NO:8 sets forth the nucleic acid sequence of the B2M 11-12 recognition sequence (sense).

[0129] SEQ ID NO:9 sets forth the nucleic acid sequence of the B2M 11-12 recognition sequence (anti-sense).

[0130] SEQ ID NO: 10 sets forth the amino acid sequence of the I-CreI meganuclease.

[0131] SEQ ID NO: 11 sets forth the amino acid sequence of the LAGLIDADG motif.

[0132] SEQ ID NO:12 sets forth the amino acid sequence of the B2M 13-14×.479 meganuclease.

[0133] SEQ ID NO:13 sets forth the amino acid sequence of the B2M 13-14×.287 meganuclease.

[0134] SEQ ID NO:14 sets forth the amino acid sequence of the B2M 13-14×.377 meganuclease.

[0135] SEQ ID NO:15 sets forth the amino acid sequence of the B2M 13-14×.169 meganuclease.

[0136] SEQ ID NO:16 sets forth the amino acid sequence of the B2M 13-14×.202 meganuclease.

[0137] SEQ ID NO:17 sets forth the amino acid sequence of the B2M 13-14×.93 meganuclease.

[0138] SEQ ID NO:18 sets forth the amino acid sequence of the B2M 13-14×.93 QE meganuclease.

[0139] SEQ ID NO:19 sets forth the amino acid sequence of the B2M 13-14×.93 EQ meganuclease.

[0140] SEQ ID NO:20 sets forth the amino acid sequence of the B2M 13-14×.93 EE meganuclease.

[0141] SEQ ID NO:21 sets forth the amino acid sequence of the B2M 13-14×.93 QQY66 meganuclease.

[0142] SEQ ID NO:22 sets forth the amino acid sequence of the B2M 13-14×.93 QQK66 meganuclease.

[0143] SEQ ID NO:23 sets forth the amino acid sequence of the B2M 13-14×.93 QQR66 meganuclease.

[0144] SEQ ID NO:24 sets forth the amino acid sequence of the B2M 13-14×.93 EEY66 meganuclease.

[0145] SEQ ID NO:25 sets forth the amino acid sequence of the B2M 13-14×.93 EEK66 meganuclease.

[0146] SEQ ID NO:26 sets forth the amino acid sequence of the B2M 13-14×.93 EER66 meganuclease.

[0147] SEQ ID NO:27 sets forth the amino acid sequence of the B2M 13-14×.93 EQY66 meganuclease.

[0148] SEQ ID NO:28 sets forth the amino acid sequence of the B2M 13-14×.93 EQK66 meganuclease.

[0149] SEQ ID NO:29 sets forth the amino acid sequence of the B2M 13-14×.93 EQR66 meganuclease.

[0150] SEQ ID NO:30 sets forth the amino acid sequence of the B2M 13-14×.3 meganuclease.

[0151] SEQ ID NO:31 sets forth the amino acid sequence of the B2M 13-14×.10 meganuclease.

[0152] SEQ ID NO:32 sets forth the amino acid sequence of the B2M 13-14×.14 meganuclease.

[0153] SEQ ID NO:33 sets forth the amino acid sequence of the B2M 13-14×.22 meganuclease.

[0154] SEQ ID NO:34 sets forth the amino acid sequence of the B2M 13-14×.67 meganuclease.

[0155] SEQ ID NO:35 sets forth the amino acid sequence of the B2M 13-14×.84 meganuclease.

[0156] SEQ ID NO:36 sets forth the amino acid sequence of the B2M 13-14×.85 meganuclease.

[0157] SEQ ID NO:37 sets forth the amino acid sequence of the B2M 13-14×.96 meganuclease.

[0158] SEQ ID NO:38 sets forth the amino acid sequence of the B2M 13-14×.97 meganuclease.

[0159] SEQ ID NO:39 sets forth the amino acid sequence of the B2M 13-14×.102 meganuclease.

[0160] SEQ ID NO:40 sets forth the amino acid sequence of the B2M 13-14×.105 meganuclease.

[0161] SEQ ID NO:41 sets forth the amino acid sequence of the B2M 13-14×.106 meganuclease.

[0162] SEQ ID NO:42 sets forth the amino acid sequence of the B2M 13-14×.115 meganuclease.

[0163] SEQ ID NO:43 sets forth the amino acid sequence of the B2M 13-14×.139 meganuclease.

[0164] SEQ ID NO:44 sets forth the amino acid sequence of the B2M 13-14×.141 meganuclease.

[0165] SEQ ID NO:45 sets forth the amino acid sequence of the B2M 13-14×.146 meganuclease.

[0166] SEQ ID NO:46 sets forth the amino acid sequence of the B2M 13-14×.162 meganuclease.

[0167] SEQ ID NO:47 sets forth the amino acid sequence of the B2M 13-14×.165 meganuclease.

[0168] SEQ ID NO:48 sets forth the amino acid sequence of the B2M 13-14×.178 meganuclease.

[0169] SEQ ID NO:49 sets forth the amino acid sequence of the B2M 13-14×.182 meganuclease.

[0170] SEQ ID NO:50 sets forth the amino acid sequence of the B2M 13-14×.198 meganuclease.

[0171] SEQ ID NO:51 sets forth the amino acid sequence of the B2M 13-14×.199 meganuclease.

[0172] SEQ ID NO:52 sets forth the amino acid sequence of the B2M 13-14×.207 meganuclease.

[0173] SEQ ID NO:53 sets forth the amino acid sequence of the B2M 13-14×.222 meganuclease.

[0174] SEQ ID NO:54 sets forth the amino acid sequence of the B2M 13-14×.245 meganuclease.

[0175] SEQ ID NO:55 sets forth the amino acid sequence of the B2M 13-14×.255 meganuclease.

[0176] SEQ ID NO:56 sets forth the amino acid sequence of the B2M 13-14×.259 meganuclease.

[0177] SEQ ID NO:57 sets forth the amino acid sequence of the B2M 13-14×.275 meganuclease.

[0178] SEQ ID NO:58 sets forth the amino acid sequence of the B2M 13-14×.280 meganuclease.

[0179] SEQ ID NO:59 sets forth the amino acid sequence of the B2M 13-14×.281 meganuclease.

[0180] SEQ ID NO:60 sets forth the amino acid sequence of the B2M 13-14×.283 meganuclease.

[0181] SEQ ID NO:61 sets forth the amino acid sequence of the B2M 13-14×.285 meganuclease.

[0182] SEQ ID NO:62 sets forth the amino acid sequence of the B2M 13-14×.286 meganuclease.

[0183] SEQ ID NO:63 sets forth the amino acid sequence of the B2M 13-14×.295 meganuclease.

[0184] SEQ ID NO:64 sets forth the amino acid sequence of the B2M 13-14×.301 meganuclease.

[0185] SEQ ID NO:65 sets forth the amino acid sequence of the B2M 13-14×.306 meganuclease.

[0186] SEQ ID NO:66 sets forth the amino acid sequence of the B2M 13-14×.317 meganuclease.

[0187] SEQ ID NO:67 sets forth the amino acid sequence of the B2M 13-14×.325 meganuclease.

[0188] SEQ ID NO:68 sets forth the amino acid sequence of the B2M 13-14×.335 meganuclease.

[0189] SEQ ID NO:69 sets forth the amino acid sequence of the B2M 13-14×.338 meganuclease.

[0190] SEQ ID NO:70 sets forth the amino acid sequence of the B2M 13-14×.347 meganuclease.

[0191] SEQ ID NO:71 sets forth the amino acid sequence of the B2M 13-14×.361 meganuclease.

[0192] SEQ ID NO:72 sets forth the amino acid sequence of the B2M 13-14×.362 meganuclease.

[0193] SEQ ID NO:73 sets forth the amino acid sequence of the B2M 13-14×.365 meganuclease.

[0194] SEQ ID NO:74 sets forth the amino acid sequence of the B2M 13-14×.369 meganuclease.

[0195] SEQ ID NO:75 sets forth the amino acid sequence of the B2M 13-14×.371 meganuclease.

[0196] SEQ ID NO:76 sets forth the amino acid sequence of the B2M 13-14×.372 meganuclease.

[0197] SEQ ID NO:77 sets forth the amino acid sequence of the B2M 13-14×.375 meganuclease.

[0198] SEQ ID NO:78 sets forth the amino acid sequence of the B2M 13-14×.378 meganuclease.

[0199] SEQ ID NO:79 sets forth the amino acid sequence of the B2M 13-14×.385 meganuclease.

[0200] SEQ ID NO:80 sets forth the amino acid sequence of the B2M 13-14×.392 meganuclease.

[0201] SEQ ID NO:81 sets forth the amino acid sequence of the B2M 13-14×.432 meganuclease.

[0202] SEQ ID NO:82 sets forth the amino acid sequence of the B2M 13-14×.433 meganuclease.

[0203] SEQ ID NO:83 sets forth the amino acid sequence of the B2M 13-14×.440 meganuclease.

[0204] SEQ ID NO:84 sets forth the amino acid sequence of the B2M 13-14×.449 meganuclease.

[0205] SEQ ID NO:85 sets forth the amino acid sequence of the B2M 13-14×.456 meganuclease.

[0206] SEQ ID NO:86 sets forth the amino acid sequence of the B2M 13-14×.457 meganuclease.

[0207] SEQ ID NO:87 sets forth the amino acid sequence of the B2M 13-14×.459 meganuclease.

[0208] SEQ ID NO:88 sets forth the amino acid sequence of the B2M 13-14×.464 meganuclease.

[0209] SEQ ID NO:89 sets forth the amino acid sequence of the B2M 13-14×.465 meganuclease.

[0210] SEQ ID NO:90 sets forth the amino acid sequence of the B2M 13-14×.470 meganuclease.

[0211] SEQ ID NO:91 sets forth the amino acid sequence of the B2M 13-14×.471 meganuclease.

[0212] SEQ ID NO:92 sets forth the amino acid sequence of the B2M 13-14×.540 meganuclease.

[0213] SEQ ID NO:93 sets forth the amino acid sequence of the B2M 13-14×.543 meganuclease.

[0214] SEQ ID NO:94 sets forth the amino acid sequence of the B2M 13-14×.551 meganuclease.

[0215] SEQ ID NO:95 sets forth the amino acid sequence of the B2M 13-14×.554 meganuclease.

[0216] SEQ ID NO:96 sets forth the amino acid sequence of the B2M 13-14×.556 meganuclease.

[0217] SEQ ID NO:97 sets forth the amino acid sequence of the B2M 13-14×.76 meganuclease.

[0218] SEQ ID NO:98 sets forth the amino acid sequence of the B2M 13-14×.82 meganuclease.

[0219] SEQ ID NO:99 sets forth the amino acid sequence of the B2M 13-14×.31 meganuclease.

[0220] SEQ ID NO:100 sets forth the amino acid sequence of the B2M 13-14×.32 meganuclease.

[0221] SEQ ID NO:101 sets forth the amino acid sequence of the B2M 5-6×.14 meganuclease.

[0222] SEQ ID NO:102 sets forth the amino acid sequence of the B2M 5-6×.5 meganuclease.

[0223] SEQ ID NO:103 sets forth the amino acid sequence of the B2M 5-6×.6 meganuclease.

[0224] SEQ ID NO:104 sets forth the amino acid sequence of the B2M 5-6×.13 meganuclease.

[0225] SEQ ID NO:105 sets forth the amino acid sequence of the B2M 5-6×.22 meganuclease.

[0226] SEQ ID NO:106 sets forth the amino acid sequence of the B2M 5-6×.31 meganuclease.

[0227] SEQ ID NO:107 sets forth the amino acid sequence of the B2M 5-6×.69 meganuclease.

[0228] SEQ ID NO:108 sets forth the amino acid sequence of the B2M 5-6×.73 meganuclease.

[0229] SEQ ID NO:109 sets forth the amino acid sequence of the B2M 5-6×.85 meganuclease.

[0230] SEQ ID NO: 110 sets forth the amino acid sequence of the B2M 5-6×.86 meganuclease.

[0231] SEQ ID NO: 111 sets forth the amino acid sequence of the B2M 5-6×.91 meganuclease.

[0232] SEQ ID NO: 112 sets forth the amino acid sequence of the B2M 5-6×.28 meganuclease.

[0233] SEQ ID NO: 113 sets forth the amino acid sequence of the B2M 5-6×.3 meganuclease.

[0234] SEQ ID NO: 114 sets forth the amino acid sequence of the B2M 7-8×.88 meganuclease.

[0235] SEQ ID NO:115 sets forth the amino acid sequence of the B2M 7-8×.7 meganuclease.

[0236] SEQ ID NO: 116 sets forth the amino acid sequence of the B2M 7-8×.23 meganuclease.

[0237] SEQ ID NO: 117 sets forth the amino acid sequence of the B2M 7-8×.30 meganuclease.

[0238] SEQ ID NO:118 sets forth the amino acid sequence of the B2M 7-8×.53 meganuclease.

[0239] SEQ ID NO: 119 sets forth the amino acid sequence of the B2M 7-8×.2 meganuclease.

[0240] SEQ ID NO:120 sets forth the amino acid sequence of the B2M 7-8×.3 meganuclease.

[0241] SEQ ID NO:121 sets forth the amino acid sequence of the B2M 7-8×.6 meganuclease.

[0242] SEQ ID NO:122 sets forth the amino acid sequence of the B2M 7-8×.25 meganuclease.

[0243] SEQ ID NO:123 sets forth the amino acid sequence of the B2M 7-8×.78 meganuclease.

[0244] SEQ ID NO:124 sets forth the amino acid sequence of the B2M 7-8×.85 meganuclease.

[0245] SEQ ID NO: 125 sets forth the amino acid sequence of the B2M 11-12×.45 meganuclease.

[0246] SEQ ID NO: 126 sets forth the amino acid sequence of the B2M 11-12×.2 meganuclease.

[0247] SEQ ID NO: 127 sets forth the nucleic acid sequence of the human T cell receptor alpha constant region gene.

[0248] SEQ ID NO: 128 sets forth the nucleic acid sequence of the TRC 1-2 recognition sequence (sense).

[0249] SEQ ID NO: 129 sets forth the nucleic acid sequence of the TRC 3-4 recognition sequence (sense).

[0250] SEQ ID NO: 130 sets forth the nucleic acid sequence of the TRC 7-8 recognition sequence (sense).

[0251] SEQ ID NO:131 sets forth the amino acid sequence of the TRC 1-2×.87 EE meganuclease.

[0252] SEQ ID NO:132 sets forth the B2M13 half-site binding subunit of the B2M 13-14×.479 meganuclease.

[0253] SEQ ID NO: 133 sets forth the B2M13 half-site binding subunit of the B2M 13-14×.287 meganuclease.

[0254] SEQ ID NO:134 sets forth the B2M13 half-site binding subunit of the B2M 13-14×.377 meganuclease.

[0255] SEQ ID NO: 135 sets forth the B2M13 half-site binding subunit of the B2M 13-14×.169 meganuclease.

[0256] SEQ ID NO: 136 sets forth the B2M13 half-site binding subunit of the B2M 13-14×.202 meganuclease.

[0257] SEQ ID NO: 137 sets forth the B2M13 half-site binding subunit of the B2M 13-14×.93 meganuclease.

[0258] SEQ ID NO: 138 sets forth the B2M13 half-site binding subunit of the B2M 13-14×.93 QE meganuclease.

[0259] SEQ ID NO: 139 sets forth the B2M13 half-site binding subunit of the B2M 13-14×.93 EQ meganuclease.

[0260] SEQ ID NO: 140 sets forth the B2M13 half-site binding subunit of the B2M 13-14×.93 EE meganuclease.

[0261] SEQ ID NO: 141 sets forth the B2M13 half-site binding subunit of the B2M 13-14×.93 QQY66 meganuclease.

[0262] SEQ ID NO: 142 sets forth the B2M13 half-site binding subunit of the B2M 13-14×.93 QQK66 meganuclease.

[0263] SEQ ID NO: 143 sets forth the B2M13 half-site binding subunit of the B2M 13-14×.93 QQR66 meganuclease.

[0264] SEQ ID NO: 144 sets forth the B2M13 half-site binding subunit of the B2M 13-14×.93 EEY66 meganuclease.

[0265] SEQ ID NO: 145 sets forth the B2M13 half-site binding subunit of the B2M 13-14×.93 EEK66 meganuclease.

[0266] SEQ ID NO: 146 sets forth the B2M13 half-site binding subunit of the B2M 13-14×.93 EER66 meganuclease.

[0267] SEQ ID NO: 147 sets forth the B2M13 half-site binding subunit of the B2M 13-14×.93 EQY66 meganuclease.

[0268] SEQ ID NO: 148 sets forth the B2M13 half-site binding subunit of the B2M 13-14×.93 EQK66 meganuclease.

[0269] SEQ ID NO: 149 sets forth the B2M13 half-site binding subunit of the B2M 13-14×.93 EQR66 meganuclease.

[0270] SEQ ID NO:150 sets forth the B2M13 half-site binding subunit of the B2M 13-14×.3 meganuclease.

[0271] SEQ ID NO:151 sets forth the B2M13 half-site binding subunit of the B2M 13-14×.10 meganuclease.

[0272] SEQ ID NO:152 sets forth the B2M13 half-site binding subunit of the B2M 13-14×.14 meganuclease.

[0273] SEQ ID NO:153 sets forth the B2M13 half-site binding subunit of the B2M 13-14×.22 meganuclease.

[0274] SEQ ID NO:154 sets forth the B2M13 half-site binding subunit of the B2M 13-14×.67 meganuclease.

[0275] SEQ ID NO:155 sets forth the B2M 13 half-site binding subunit of the B2M 13-14×.84 meganuclease.

[0276] SEQ ID NO:156 sets forth the B2M13 half-site binding subunit of the B2M 13-14×.85 meganuclease.

[0277] SEQ ID NO:157 sets forth the B2M13 half-site binding subunit of the B2M 13-14×.96 meganuclease.

[0278] SEQ ID NO:158 sets forth the B2M 13 half-site binding subunit of the B2M 13-14×.97 meganuclease.

[0279] SEQ ID NO:159 sets forth the B2M13 half-site binding subunit of the B2M 13-14×.102 meganuclease.

[0280] SEQ ID NO: 160 sets forth the B2M13 half-site binding subunit of the B2M 13-14×.105 meganuclease.

[0281] SEQ ID NO: 161 sets forth the B2M13 half-site binding subunit of the B2M 13-14×.106 meganuclease.

[0282] SEQ ID NO: 162 sets forth the B2M13 half-site binding subunit of the B2M 13-14×.115 meganuclease.

[0283] SEQ ID NO: 163 sets forth the B2M13 half-site binding subunit of the B2M 13-14×.139 meganuclease.

[0284] SEQ ID NO: 164 sets forth the B2M13 half-site binding subunit of the B2M 13-14×.141 meganuclease.

[0285] SEQ ID NO: 165 sets forth the B2M13 half-site binding subunit of the B2M 13-14×.146 meganuclease.

[0286] SEQ ID NO: 166 sets forth the B2M13 half-site binding subunit of the B2M 13-14×.162 meganuclease.

[0287] SEQ ID NO: 167 sets forth the B2M13 half-site binding subunit of the B2M 13-14×.165 meganuclease.

[0288] SEQ ID NO: 168 sets forth the B2M13 half-site binding subunit of the B2M 13-14×.178 meganuclease.

[0289] SEQ ID NO: 169 sets forth the B2M13 half-site binding subunit of the B2M 13-14×.182 meganuclease.

[0290] SEQ ID NO: 170 sets forth the B2M13 half-site binding subunit of the B2M 13-14×.198 meganuclease.

[0291] SEQ ID NO: 171 sets forth the B2M13 half-site binding subunit of the B2M 13-14×.199 meganuclease.

[0292] SEQ ID NO: 172 sets forth the B2M13 half-site binding subunit of the B2M 13-14×.207 meganuclease.

[0293] SEQ ID NO: 173 sets forth the B2M13 half-site binding subunit of the B2M 13-14×.222 meganuclease.

[0294] SEQ ID NO: 174 sets forth the B2M13 half-site binding subunit of the B2M 13-14×.245 meganuclease.

[0295] SEQ ID NO: 175 sets forth the B2M13 half-site binding subunit of the B2M 13-14×.255 meganuclease.

[0296] SEQ ID NO: 176 sets forth the B2M13 half-site binding subunit of the B2M 13-14×.259 meganuclease.

[0297] SEQ ID NO: 177 sets forth the B2M13 half-site binding subunit of the B2M 13-14×.275 meganuclease.

[0298] SEQ ID NO: 178 sets forth the B2M13 half-site binding subunit of the B2M 13-14×.280 meganuclease.

[0299] SEQ ID NO: 179 sets forth the B2M13 half-site binding subunit of the B2M 13-14×.281 meganuclease.

[0300] SEQ ID NO:180 sets forth the B2M13 half-site binding subunit of the B2M 13-14×.283 meganuclease.

[0301] SEQ ID NO:181 sets forth the B2M13 half-site binding subunit of the B2M 13-14×.285 meganuclease.

[0302] SEQ ID NO:182 sets forth the B2M 13 half-site binding subunit of the B2M 13-14×.286 meganuclease.

[0303] SEQ ID NO:183 sets forth the B2M13 half-site binding subunit of the B2M 13-14×.295 meganuclease.

[0304] SEQ ID NO:184 sets forth the B2M 13 half-site binding subunit of the B2M 13-14×.301 meganuclease.

[0305] SEQ ID NO:185 sets forth the B2M13 half-site binding subunit of the B2M 13-14×.306 meganuclease.

[0306] SEQ ID NO:186 sets forth the B2M13 half-site binding subunit of the B2M 13-14×.317 meganuclease.

[0307] SEQ ID NO:187 sets forth the B2M13 half-site binding subunit of the B2M 13-14×.325 meganuclease.

[0308] SEQ ID NO:188 sets forth the B2M13 half-site binding subunit of the B2M 13-14×.335 meganuclease.

[0309] SEQ ID NO:189 sets forth the B2M13 half-site binding subunit of the B2M 13-14×.338 meganuclease.

[0310] SEQ ID NO: 190 sets forth the B2M13 half-site binding subunit of the B2M 13-14×.347 meganuclease.

[0311] SEQ ID NO: 191 sets forth the B2M13 half-site binding subunit of the B2M 13-14×.361 meganuclease.

[0312] SEQ ID NO: 192 sets forth the B2M13 half-site binding subunit of the B2M 13-14×.362 meganuclease.

[0313] SEQ ID NO: 193 sets forth the B2M13 half-site binding subunit of the B2M 13-14×.365 meganuclease.

[0314] SEQ ID NO: 194 sets forth the B2M13 half-site binding subunit of the B2M 13-14×.369 meganuclease.

[0315] SEQ ID NO: 195 sets forth the B2M13 half-site binding subunit of the B2M 13-14×.371 meganuclease.

[0316] SEQ ID NO: 196 sets forth the B2M13 half-site binding subunit of the B2M 13-14×.372 meganuclease.

[0317] SEQ ID NO: 197 sets forth the B2M13 half-site binding subunit of the B2M 13-14×.375 meganuclease.

[0318] SEQ ID NO: 198 sets forth the B2M13 half-site binding subunit of the B2M 13-14×.378 meganuclease.

[0319] SEQ ID NO: 199 sets forth the B2M13 half-site binding subunit of the B2M 13-14×.385 meganuclease.

[0320] SEQ ID NO:200 sets forth the B2M13 half-site binding subunit of the B2M 13-14×.392 meganuclease.

[0321] SEQ ID NO:201 sets forth the B2M13 half-site binding subunit of the B2M 13-14×.432 meganuclease.

[0322] SEQ ID NO:202 sets forth the B2M13 half-site binding subunit of the B2M 13-14×.433 meganuclease.

[0323] SEQ ID NO:203 sets forth the B2M13 half-site binding subunit of the B2M 13-14×.440 meganuclease.

[0324] SEQ ID NO:204 sets forth the B2M13 half-site binding subunit of the B2M 13-14×.449 meganuclease.

[0325] SEQ ID NO:205 sets forth the B2M13 half-site binding subunit of the B2M 13-14×.456 meganuclease.

[0326] SEQ ID NO:206 sets forth the B2M13 half-site binding subunit of the B2M 13-14×.457 meganuclease.

[0327] SEQ ID NO:207 sets forth the B2M13 half-site binding subunit of the B2M 13-14×.459 meganuclease.

[0328] SEQ ID NO:208 sets forth the B2M13 half-site binding subunit of the B2M 13-14×.464 meganuclease.

[0329] SEQ ID NO:209 sets forth the B2M13 half-site binding subunit of the B2M 13-14×.465 meganuclease.

[0330] SEQ ID NO:210 sets forth the B2M13 half-site binding subunit of the B2M 13-14×.470 meganuclease.

[0331] SEQ ID NO:211 sets forth the B2M13 half-site binding subunit of the B2M 13-14×.471 meganuclease.

[0332] SEQ ID NO:212 sets forth the B2M13 half-site binding subunit of the B2M 13-14×.540 meganuclease.

[0333] SEQ ID NO:213 sets forth the B2M13 half-site binding subunit of the B2M 13-14×.543 meganuclease.

[0334] SEQ ID NO:214 sets forth the B2M13 half-site binding subunit of the B2M 13-14×.551 meganuclease.

[0335] SEQ ID NO:215 sets forth the B2M13 half-site binding subunit of the B2M 13-14×.554 meganuclease.

[0336] SEQ ID NO:216 sets forth the B2M13 half-site binding subunit of the B2M 13-14×.556 meganuclease.

[0337] SEQ ID NO:217 sets forth the B2M13 half-site binding subunit of the B2M 13-14×.76 meganuclease.

[0338] SEQ ID NO:218 sets forth the B2M13 half-site binding subunit of the B2M 13-14×.82 meganuclease.

[0339] SEQ ID NO:219 sets forth the B2M13 half-site binding subunit of the B2M 13-14×.31 meganuclease.

[0340] SEQ ID NO:220 sets forth the B2M13 half-site binding subunit of the B2M 13-14×.32 meganuclease.

[0341] SEQ ID NO:221 sets forth the B2M14 half-site binding subunit of the B2M 13-14×.479 meganuclease.

[0342] SEQ ID NO:222 sets forth the B2M14 half-site binding subunit of the B2M 13-14×.287 meganuclease.

[0343] SEQ ID NO:223 sets forth the B2M14 half-site binding subunit of the B2M 13-14×.377 meganuclease.

[0344] SEQ ID NO:224 sets forth the B2M14 half-site binding subunit of the B2M 13-14×.169 meganuclease.

[0345] SEQ ID NO:225 sets forth the B2M14 half-site binding subunit of the B2M 13-14×.202 meganuclease.

[0346] SEQ ID NO:226 sets forth the B2M14 half-site binding subunit of the B2M 13-14×.93 meganuclease.

[0347] SEQ ID NO:227 sets forth the B2M14 half-site binding subunit of the B2M 13-14×.93 QE meganuclease.

[0348] SEQ ID NO:228 sets forth the B2M14 half-site binding subunit of the B2M 13-14×.93 EQ meganuclease.

[0349] SEQ ID NO:229 sets forth the B2M14 half-site binding subunit of the B2M 13-14×.93 EE meganuclease.

[0350] SEQ ID NO:230 sets forth the B2M14 half-site binding subunit of the B2M 13-14×.93 QQY66 meganuclease.

[0351] SEQ ID NO:231 sets forth the B2M14 half-site binding subunit of the B2M 13-14×.93 QQK66 meganuclease.

[0352] SEQ ID NO:232 sets forth the B2M14 half-site binding subunit of the B2M 13-14×.93 QQR66 meganuclease.

[0353] SEQ ID NO:233 sets forth the B2M14 half-site binding subunit of the B2M 13-14×.93 EEY66 meganuclease.

[0354] SEQ ID NO:234 sets forth the B2M14 half-site binding subunit of the B2M 13-14×.93 EEK66 meganuclease.

[0355] SEQ ID NO:235 sets forth the B2M14 half-site binding subunit of the B2M 13-14×.93 EER66 meganuclease.

[0356] SEQ ID NO:236 sets forth the B2M14 half-site binding subunit of the B2M 13-14×.93 EQY66 meganuclease.

[0357] SEQ ID NO:237 sets forth the B2M14 half-site binding subunit of the B2M 13-14×.93 EQK66 meganuclease.

[0358] SEQ ID NO:238 sets forth the B2M14 half-site binding subunit of the B2M 13-14×.93 EQR66 meganuclease.

[0359] SEQ ID NO:239 sets forth the B2M14 half-site binding subunit of the B2M 13-14×.3 meganuclease.

[0360] SEQ ID NO:240 sets forth the B2M14 half-site binding subunit of the B2M 13-14×.10 meganuclease.

[0361] SEQ ID NO:241 sets forth the B2M14 half-site binding subunit of the B2M 13-14×.14 meganuclease.

[0362] SEQ ID NO:242 sets forth the B2M14 half-site binding subunit of the B2M 13-14×.22 meganuclease.

[0363] SEQ ID NO:243 sets forth the B2M14 half-site binding subunit of the B2M 13-14×.67 meganuclease.

[0364] SEQ ID NO:244 sets forth the B2M14 half-site binding subunit of the B2M 13-14×.84 meganuclease.

[0365] SEQ ID NO:245 sets forth the B2M14 half-site binding subunit of the B2M 13-14×.85 meganuclease.

[0366] SEQ ID NO:246 sets forth the B2M14 half-site binding subunit of the B2M 13-14×.96 meganuclease.

[0367] SEQ ID NO:247 sets forth the B2M14 half-site binding subunit of the B2M 13-14×.97 meganuclease.

[0368] SEQ ID NO:248 sets forth the B2M14 half-site binding subunit of the B2M 13-14×.102 meganuclease.

[0369] SEQ ID NO:249 sets forth the B2M14 half-site binding subunit of the B2M 13-14×.105 meganuclease.

[0370] SEQ ID NO:250 sets forth the B2M14 half-site binding subunit of the B2M 13-14×.106 meganuclease.

[0371] SEQ ID NO:251 sets forth the B2M14 half-site binding subunit of the B2M 13-14×.115 meganuclease.

[0372] SEQ ID NO:252 sets forth the B2M14 half-site binding subunit of the B2M 13-14×.139 meganuclease.

[0373] SEQ ID NO:253 sets forth the B2M14 half-site binding subunit of the B2M 13-14×.141 meganuclease.

[0374] SEQ ID NO:254 sets forth the B2M14 half-site binding subunit of the B2M 13-14×.146 meganuclease.

[0375] SEQ ID NO:255 sets forth the B2M14 half-site binding subunit of the B2M 13-14×.162 meganuclease.

[0376] SEQ ID NO:256 sets forth the B2M14 half-site binding subunit of the B2M 13-14×.165 meganuclease.

[0377] SEQ ID NO:257 sets forth the B2M14 half-site binding subunit of the B2M 13-14×.178 meganuclease.

[0378] SEQ ID NO:258 sets forth the B2M14 half-site binding subunit of the B2M 13-14×.182 meganuclease.

[0379] SEQ ID NO:259 sets forth the B2M14 half-site binding subunit of the B2M 13-14×.198 meganuclease.

[0380] SEQ ID NO:260 sets forth the B2M14 half-site binding subunit of the B2M 13-14×.199 meganuclease.

[0381] SEQ ID NO:261 sets forth the B2M14 half-site binding subunit of the B2M 13-14×.207 meganuclease.

[0382] SEQ ID NO:262 sets forth the B2M14 half-site binding subunit of the B2M 13-14×.222 meganuclease.

[0383] SEQ ID NO:263 sets forth the B2M14 half-site binding subunit of the B2M 13-14×.245 meganuclease.

[0384] SEQ ID NO:264 sets forth the B2M14 half-site binding subunit of the B2M 13-14×.255 meganuclease.

[0385] SEQ ID NO:265 sets forth the B2M14 half-site binding subunit of the B2M 13-14×.259 meganuclease.

[0386] SEQ ID NO:266 sets forth the B2M14 half-site binding subunit of the B2M 13-14×.275 meganuclease.

[0387] SEQ ID NO:267 sets forth the B2M14 half-site binding subunit of the B2M 13-14×.280 meganuclease.

[0388] SEQ ID NO:268 sets forth the B2M14 half-site binding subunit of the B2M 13-14×.281 meganuclease.

[0389] SEQ ID NO:269 sets forth the B2M14 half-site binding subunit of the B2M 13-14×.283 meganuclease.

[0390] SEQ ID NO:270 sets forth the B2M14 half-site binding subunit of the B2M 13-14×.285 meganuclease.

[0391] SEQ ID NO:271 sets forth the B2M14 half-site binding subunit of the B2M 13-14×.286 meganuclease.

[0392] SEQ ID NO:272 sets forth the B2M14 half-site binding subunit of the B2M 13-14×.295 meganuclease.

[0393] SEQ ID NO:273 sets forth the B2M14 half-site binding subunit of the B2M 13-14×.301 meganuclease.

[0394] SEQ ID NO:274 sets forth the B2M14 half-site binding subunit of the B2M 13-14×.306 meganuclease.

[0395] SEQ ID NO:275 sets forth the B2M14 half-site binding subunit of the B2M 13-14×.317 meganuclease.

[0396] SEQ ID NO:276 sets forth the B2M14 half-site binding subunit of the B2M 13-14×.325 meganuclease.

[0397] SEQ ID NO:277 sets forth the B2M14 half-site binding subunit of the B2M 13-14×.335 meganuclease.

[0398] SEQ ID NO:278 sets forth the B2M14 half-site binding subunit of the B2M 13-14×.338 meganuclease.

[0399] SEQ ID NO:279 sets forth the B2M14 half-site binding subunit of the B2M 13-14×.347 meganuclease.

[0400] SEQ ID NO:280 sets forth the B2M14 half-site binding subunit of the B2M 13-14×.361 meganuclease.

[0401] SEQ ID NO:281 sets forth the B2M14 half-site binding subunit of the B2M 13-14×.362 meganuclease.

[0402] SEQ ID NO:282 sets forth the B2M14 half-site binding subunit of the B2M 13-14×.365 meganuclease.

[0403] SEQ ID NO:283 sets forth the B2M14 half-site binding subunit of the B2M 13-14×.369 meganuclease.

[0404] SEQ ID NO:284 sets forth the B2M14 half-site binding subunit of the B2M 13-14×.371 meganuclease.

[0405] SEQ ID NO:285 sets forth the B2M14 half-site binding subunit of the B2M 13-14×.372 meganuclease.

[0406] SEQ ID NO:286 sets forth the B2M14 half-site binding subunit of the B2M 13-14×.375 meganuclease.

[0407] SEQ ID NO:287 sets forth the B2M14 half-site binding subunit of the B2M 13-14×.378 meganuclease.

[0408] SEQ ID NO:288 sets forth the B2M14 half-site binding subunit of the B2M 13-14×.385 meganuclease.

[0409] SEQ ID NO:289 sets forth the B2M14 half-site binding subunit of the B2M 13-14×.392 meganuclease.

[0410] SEQ ID NO:290 sets forth the B2M14 half-site binding subunit of the B2M 13-14×.432 meganuclease.

[0411] SEQ ID NO:291 sets forth the B2M14 half-site binding subunit of the B2M 13-14×.433 meganuclease.

[0412] SEQ ID NO:292 sets forth the B2M14 half-site binding subunit of the B2M 13-14×.440 meganuclease.

[0413] SEQ ID NO:293 sets forth the B2M14 half-site binding subunit of the B2M 13-14×.449 meganuclease.

[0414] SEQ ID NO:294 sets forth the B2M14 half-site binding subunit of the B2M 13-14×.456 meganuclease.

[0415] SEQ ID NO:295 sets forth the B2M14 half-site binding subunit of the B2M 13-14×.457 meganuclease.

[0416] SEQ ID NO:296 sets forth the B2M14 half-site binding subunit of the B2M 13-14×.459 meganuclease.

[0417] SEQ ID NO:297 sets forth the B2M14 half-site binding subunit of the B2M 13-14×.464 meganuclease.

[0418] SEQ ID NO:298 sets forth the B2M14 half-site binding subunit of the B2M 13-14×.465 meganuclease.

[0419] SEQ ID NO:299 sets forth the B2M14 half-site binding subunit of the B2M 13-14×.470 meganuclease.

[0420] SEQ ID NO:300 sets forth the B2M14 half-site binding subunit of the B2M 13-14×.471 meganuclease.

[0421] SEQ ID NO:301 sets forth the B2M14 half-site binding subunit of the B2M 13-14×.540 meganuclease.

[0422] SEQ ID NO:302 sets forth the B2M14 half-site binding subunit of the B2M 13-14×.543 meganuclease.

[0423] SEQ ID NO:303 sets forth the B2M14 half-site binding subunit of the B2M 13-14×.551 meganuclease.

[0424] SEQ ID NO:304 sets forth the B2M14 half-site binding subunit of the B2M 13-14×.554 meganuclease.

[0425] SEQ ID NO:305 sets forth the B2M14 half-site binding subunit of the B2M 13-14×.556 meganuclease.

[0426] SEQ ID NO:306 sets forth the B2M14 half-site binding subunit of the B2M 13-14×.76 meganuclease.

[0427] SEQ ID NO:307 sets forth the B2M14 half-site binding subunit of the B2M 13-14×.82 meganuclease.

[0428] SEQ ID NO:308 sets forth the B2M14 half-site binding subunit of the B2M 13-14×.31 meganuclease.

[0429] SEQ ID NO:309 sets forth the B2M14 half-site binding subunit of the B2M 13-14×.32 meganuclease.

[0430] SEQ ID NO:310 sets forth the B2M5 half-site binding subunit of the B2M 5-6×.14 meganuclease.

[0431] SEQ ID NO:311 sets forth the B2M5 half-site binding subunit of the B2M 5-6×.5 meganuclease.

[0432] SEQ ID NO:312 sets forth the B2M5 half-site binding subunit of the B2M 5-6×.6 meganuclease.

[0433] SEQ ID NO:313 sets forth the B2M5 half-site binding subunit of the B2M 5-6×.13 meganuclease.

[0434] SEQ ID NO:314 sets forth the B2M5 half-site binding subunit of the B2M 5-6×.22 meganuclease.

[0435] SEQ ID NO:315 sets forth the B2M5 half-site binding subunit of the B2M 5-6×.31 meganuclease.

[0436] SEQ ID NO:316 sets forth the B2M5 half-site binding subunit of the B2M 5-6×.69 meganuclease.

[0437] SEQ ID NO:317 sets forth the B2M5 half-site binding subunit of the B2M 5-6×.73 meganuclease.

[0438] SEQ ID NO:318 sets forth the B2M5 half-site binding subunit of the B2M 5-6×.85 meganuclease.

[0439] SEQ ID NO:319 sets forth the B2M5 half-site binding subunit of the B2M 5-6×.86 meganuclease.

[0440] SEQ ID NO:320 sets forth the B2M5 half-site binding subunit of the B2M 5-6×.91 meganuclease.

[0441] SEQ ID NO:321 sets forth the B2M5 half-site binding subunit of the B2M 5-6×.28 meganuclease.

[0442] SEQ ID NO:322 sets forth the B2M5 half-site binding subunit of the B2M 5-6×.3 meganuclease.

[0443] SEQ ID NO:323 sets forth the B2M6 half-site binding subunit of the B2M 5-6×.14 meganuclease.

[0444] SEQ ID NO:324 sets forth the B2M6 half-site binding subunit of the B2M 5-6×.5 meganuclease.

[0445] SEQ ID NO:325 sets forth the B2M6 half-site binding subunit of the B2M 5-6×.6 meganuclease.

[0446] SEQ ID NO:326 sets forth the B2M6 half-site binding subunit of the B2M 5-6×.13 meganuclease.

[0447] SEQ ID NO:327 sets forth the B2M6 half-site binding subunit of the B2M 5-6×.22 meganuclease.

[0448] SEQ ID NO:328 sets forth the B2M6 half-site binding subunit of the B2M 5-6×.31 meganuclease.

[0449] SEQ ID NO:329 sets forth the B2M6 half-site binding subunit of the B2M 5-6×.69 meganuclease.

[0450] SEQ ID NO:330 sets forth the B2M6 half-site binding subunit of the B2M 5-6×.73 meganuclease.

[0451] SEQ ID NO:331 sets forth the B2M6 half-site binding subunit of the B2M 5-6×.85 meganuclease.

[0452] SEQ ID NO:332 sets forth the B2M6 half-site binding subunit of the B2M 5-6×.86 meganuclease.

[0453] SEQ ID NO:333 sets forth the B2M6 half-site binding subunit of the B2M 5-6×.91 meganuclease.

[0454] SEQ ID NO:334 sets forth the B2M6 half-site binding subunit of the B2M 5-6×.28 meganuclease.

[0455] SEQ ID NO:335 sets forth the B2M6 half-site binding subunit of the B2M 5-6×.3 meganuclease.

[0456] SEQ ID NO:336 sets forth the B2M7 half-site binding subunit of the B2M 7-8×.88 meganuclease.

[0457] SEQ ID NO:337 sets forth the B2M7 half-site binding subunit of the B2M 7-8×.7 meganuclease.

[0458] SEQ ID NO:338 sets forth the B2M7 half-site binding subunit of the B2M 7-8×.23 meganuclease.

[0459] SEQ ID NO:339 sets forth the B2M7 half-site binding subunit of the B2M 7-8×.30 meganuclease.

[0460] SEQ ID NO:340 sets forth the B2M7 half-site binding subunit of the B2M 7-8×.53 meganuclease.

[0461] SEQ ID NO:341 sets forth the B2M7 half-site binding subunit of the B2M 7-8×.2 meganuclease.

[0462] SEQ ID NO:342 sets forth the B2M7 half-site binding subunit of the B2M 7-8×.3 meganuclease.

[0463] SEQ ID NO:343 sets forth the B2M7 half-site binding subunit of the B2M 7-8×.6 meganuclease.

[0464] SEQ ID NO:344 sets forth the B2M7 half-site binding subunit of the B2M 7-8×.25 meganuclease.

[0465] SEQ ID NO:345 sets forth the B2M7 half-site binding subunit of the B2M 7-8×.78 meganuclease.

[0466] SEQ ID NO:346 sets forth the B2M7 half-site binding subunit of the B2M 7-8×.85 meganuclease.

[0467] SEQ ID NO:347 sets forth the B2M8 half-site binding subunit of the B2M 7-8×.88 meganuclease.

[0468] SEQ ID NO:348 sets forth the B2M8 half-site binding subunit of the B2M 7-8×.7 meganuclease.

[0469] SEQ ID NO:349 sets forth the B2M8 half-site binding subunit of the B2M 7-8×.23 meganuclease.

[0470] SEQ ID NO:350 sets forth the B2M8 half-site binding subunit of the B2M 7-8×.30 meganuclease.

[0471] SEQ ID NO:351 sets forth the B2M8 half-site binding subunit of the B2M 7-8×.53 meganuclease.

[0472] SEQ ID NO:352 sets forth the B2M8 half-site binding subunit of the B2M 7-8×.2 meganuclease.

[0473] SEQ ID NO:353 sets forth the B2M8 half-site binding subunit of the B2M 7-8×.3 meganuclease.

[0474] SEQ ID NO:354 sets forth the B2M8 half-site binding subunit of the B2M 7-8×.6 meganuclease.

[0475] SEQ ID NO:355 sets forth the B2M8 half-site binding subunit of the B2M 7-8×.25 meganuclease.

[0476] SEQ ID NO:356 sets forth the B2M8 half-site binding subunit of the B2M 7-8×.78 meganuclease.

[0477] SEQ ID NO:357 sets forth the B2M8 half-site binding subunit of the B2M 7-8×.85 meganuclease.

[0478] SEQ ID NO:358 sets forth the B2M11 half-site binding subunit of the B2M 11-12×.45 meganuclease.

[0479] SEQ ID NO:359 sets forth the B2M11 half-site binding subunit of the B2M 11-12×.2 meganuclease.

[0480] SEQ ID NO:360 sets forth the B2M12 half-site binding subunit of the B2M 11-12×.45 meganuclease.

[0481] SEQ ID NO:361 sets forth the B2M12 half-site binding subunit of the B2M 11-12×.2 meganuclease.

[0482] SEQ ID NO:362 sets forth the nucleic acid sequence of an IRES element.

[0483] SEQ ID NO:363 sets forth the nucleic acid sequence of a T2A element.

[0484] SEQ ID NO:364 sets forth the nucleic acid sequence of a P2A element.

[0485] SEQ ID NO:365 sets forth the nucleic acid sequence of a E2A element.

[0486] SEQ ID NO:366 sets forth the nucleic acid sequence of a F2A element.

[0487] SEQ ID NO:367 sets forth the nucleic acid sequence of a TRC-IRES-B2M bicistronic mRNA.

[0488] SEQ ID NO:368 sets forth the nucleic acid sequence of a TRC-T2A-B2M bicistronic mRNA.

[0489] SEQ ID NO:369 sets forth the nucleic acid sequence of a TRC-P2A-B2M bicistronic mRNA.

[0490] SEQ ID NO:370 sets forth the nucleic acid sequence of a TRC-E2A-B2M bicistronic mRNA.

[0491] SEQ ID NO:371 sets forth the nucleic acid sequence of a TRC-F2A-B2M bicistronic mRNA.

[0492] SEQ ID NO:372 sets forth the nucleic acid sequence of a B2M-IRES-TRC bicistronic mRNA.

[0493] SEQ ID NO:373 sets forth the nucleic acid sequence of a B2M-T2A-TRC bicistronic mRNA.

[0494] SEQ ID NO:374 sets forth the nucleic acid sequence of a B2M-P2A-TRC bicistronic mRNA.

[0495] SEQ ID NO:375 sets forth the nucleic acid sequence of a B2M-E2A-TRC bicistronic mRNA.

[0496] SEQ ID NO:376 sets forth the nucleic acid sequence of a B2M-F2A-TRC bicistronic mRNA.

### DETAILED DESCRIPTION OF THE INVENTION

### 1.1 References and Definitions

[0497] The patent and scientific literature referred to herein establishes knowledge that is available to those of skill in the art. The issued US patents, allowed applications, published foreign applications, and references, including GenBank database sequences, which are cited herein are hereby incorporated by reference to the same extent as if each was specifically and individually indicated to be incorporated by reference.

[0498] The present disclosure is embodied in different forms and should not be construed as limited to the embodiments set forth herein. Rather, these embodiments are provided so that this disclosure will be thorough and complete, and will fully convey the scope of the disclosure to those skilled in the art. For example, features illustrated with respect to one embodiment can be incorporated into other embodiments, and features illustrated with respect to a particular embodiment can be deleted from that embodiment. In addition, numerous variations and additions to the embodiments suggested herein will be apparent to those skilled in the art in light of the instant disclosure, which do not depart from the instant disclosure.

[0499] Unless otherwise defined, all technical and scientific terms used herein have the same meaning as commonly understood by one of ordinary skill in the art to which this disclosure belongs. The terminology used in the description of the disclosure herein is for the purpose of describing particular embodiments only and is not intended to be limiting of the disclosure.

[0500] All publications, patent applications, patents, and other references mentioned herein are incorporated by reference herein in their entirety.

[0501] As used herein, “a,” “an,” or “the” can mean one or more than one. For example, “a” cell can mean a single cell or a multiplicity of cells.

[0502] As used herein, unless specifically indicated otherwise, the word “or” is used in the inclusive sense of “and/or” and not the exclusive sense of “either/or.”

[0503] As used herein, the term “meganuclease” refers to an endonuclease that binds double-stranded DNA at a recognition sequence that is greater than 12 base pairs. Preferably, the recognition sequence for a meganuclease of the disclosure is 22 base pairs. A meganuclease is an endonuclease that is derived from I-CreI, and can refer to an engineered variant of I-CreI that has been modified relative to natural I-CreI with respect to, for example, DNA-binding specificity, DNA cleavage activity, DNA-binding affinity, or dimerization properties. Methods for producing such modified variants of I-CreI are known in the art (e.g. WO 2007/047859). A meganuclease as used herein binds to double-stranded DNA as a heterodimer. A meganuclease may also be a “single-chain meganuclease” in which a pair of DNA-binding domains are joined into a single polypeptide using a peptide linker. The term “homing endonuclease” is synonymous with the term “meganuclease.” Meganucleases of the disclosure are substantially non-toxic when expressed in cells, particularly in human T cells, such that cells can be transfected and maintained at 37° C. without observing deleterious effects on cell viability or significant reductions in meganuclease cleavage activity when measured using the methods described herein.

[0504] As used herein, the term “single-chain meganuclease” refers to a polypeptide comprising a pair of nuclease subunits joined by a linker. A single-chain meganuclease has the organization: N-terminal subunit-Linker-C-terminal subunit. The two meganuclease subunits will generally be non-identical in amino acid sequence and will recognize non-identical DNA sequences. Thus, single-chain meganucleases typically cleave pseudo-palindromic or non-palindromic recognition sequences. A single-chain meganuclease is referred to as a “single-chain heterodimer” or “single-chain heterodimeric meganuclease” although it is not, in fact, dimeric. For clarity, unless otherwise specified, the term “meganuclease” can refer to a dimeric or single-chain meganuclease.

[0505] As used herein, the term “linker” refers to an exogenous peptide sequence used to join two meganuclease subunits into a single polypeptide. A linker may have a sequence that is found in natural proteins, or is an artificial sequence that is not found in any natural protein. A linker is flexible and lacking in secondary structure or may have a propensity to form a specific three-dimensional structure under physiological conditions. A linker can include, without limitation, those encompassed by U.S. Pat. No. 8,445,251. In some embodiments, a linker may have an amino acid sequence comprising residues 154-195 of any one of SEQ ID NOs: 12-126.

[0506] As used herein, the term “TALEN” refers to an endonuclease comprising a DNA-binding domain comprising 16-22 TAL domain repeats fused to any portion of the FokI nuclease domain.

[0507] As used herein, the term “Compact TALEN” refers to an endonuclease comprising a DNA-binding domain with 16-22 TAL domain repeats fused in any orientation to any portion of the I-TevI homing endonuclease.

[0508] As used herein, the term “zinc finger nuclease” or “ZFN” refers to a chimeric endonuclease comprising a zinc finger DNA-binding domain fused to the nuclease domain of the FokI restriction enzyme. The zinc finger domain can be redesigned through rational or experimental means to produce a protein which binds to a pre-determined DNA sequence ˜18 basepairs in length, comprising a pair of nine basepair half-sites separated by 2-10 basepairs. Cleavage by a zinc finger nuclease can create a blunt end or a 5′ overhand of variable length (frequently four basepairs).

[0509] As used herein, the term “CRISPR” refers to a caspase-based endonuclease comprising a caspase, such as Cas9, and a guide RNA that directs DNA cleavage of the caspase by hybridizing to a recognition site in the genomic DNA.

[0510] As used herein, the term “megaTAL” refers to a single-chain nuclease comprising a transcription activator-like effector (TALE) DNA binding domain with an engineered, sequence-specific homing endonuclease.

[0511] As used herein, with respect to a protein, the term “recombinant” means having an altered amino acid sequence as a result of the application of genetic engineering techniques to nucleic acids which encode the protein, and cells or organisms which express the protein. With respect to a nucleic acid, the term “recombinant” means having an altered nucleic acid sequence as a result of the application of genetic engineering techniques. Genetic engineering techniques include, but are not limited to, PCR and DNA cloning technologies; transfection, transformation and other gene transfer technologies; homologous recombination; site-directed mutagenesis; and gene fusion. In accordance with this definition, a protein having an amino acid sequence identical to a naturally-occurring protein, but produced by cloning and expression in a heterologous host, is not considered recombinant.

[0512] As used herein, the term “wild-type” refers to the most common naturally occurring allele (i.e., polynucleotide sequence) in the allele population of the same type of gene, wherein a polypeptide encoded by the wild-type allele has its original functions. The term “wild-type” also refers a polypeptide encoded by a wild-type allele. Wild-type alleles (i.e., polynucleotides) and polypeptides are distinguishable from mutant or variant alleles and polypeptides, which comprise one or more mutations and/or substitutions relative to the wild-type sequence(s). Whereas a wild-type allele or polypeptide can confer a normal phenotype in an organism, a mutant or variant allele or polypeptide can, in some instances, confer an altered phenotype. Wild-type nucleases are distinguishable from recombinant or non-naturally-occurring nucleases.

[0513] As used herein with respect to recombinant proteins, the term “modification” means any insertion, deletion or substitution of an amino acid residue in the recombinant sequence relative to a reference sequence (e.g., a wild-type or a native sequence).

[0514] As used herein, the term “recognition sequence” refers to a DNA sequence that is bound and cleaved by an endonuclease. In the case of a meganuclease, a recognition sequence comprises a pair of inverted, 9 base pair “half sites” which are separated by four basepairs. In the case of a single-chain meganuclease, the N-terminal domain of the protein contacts a first half-site and the C-terminal domain of the protein contacts a second half-site. Cleavage by a meganuclease produces four base pair 3′ “overhangs”. “Overhangs”, or “sticky ends” are short, single-stranded DNA segments that can be produced by endonuclease cleavage of a double-stranded DNA sequence. In the case of meganucleases and single-chain meganucleases derived from I-CreI, the overhang comprises bases 10-13 of the 22 base pair recognition sequence. In the case of a Compact TALEN, the recognition sequence comprises a first CNNNGN sequence that is recognized by the I-TevI domain, followed by a non-specific spacer 4-16 basepairs in length, followed by a second sequence 16-22 bp in length that is recognized by the TAL-effector domain (this sequence typically has a 5′ T base). Cleavage by a Compact TALEN produces two base pair 3′ overhangs. In the case of a CRISPR, the recognition sequence is the sequence, typically 16-24 basepairs, to which the guide RNA binds to direct Cas9 cleavage. Cleavage by a CRISPR produced blunt ends.

[0515] As used herein, the term “target site” or “target sequence” refers to a region of the chromosomal DNA of a cell comprising a recognition sequence for a nuclease.

[0516] As used herein, the term “DNA-binding affinity” or “binding affinity” means the tendency of a meganuclease to non-covalently associate with a reference DNA molecule (e.g., a recognition sequence or an arbitrary sequence). Binding affinity is measured by a dissociation constant, K_{d}. As used herein, a nuclease has “altered” binding affinity if the K_{d} of the nuclease for a reference recognition sequence is increased or decreased by a statistically significant (p<0.05) amount relative to a reference nuclease.

[0517] As used herein, the term “homologous recombination” or “HR” refers to the natural, cellular process in which a double-stranded DNA-break is repaired using a homologous DNA sequence as the repair template (see, e.g. Cahill et al. (2006), Front. Biosci. 11:1958-1976). The homologous DNA sequence is an endogenous chromosomal sequence or an exogenous nucleic acid that was delivered to the cell.

[0518] As used herein, the term “non-homologous end-joining” or “NHEJ” refers to the natural, cellular process in which a double-stranded DNA-break is repaired by the direct joining of two non-homologous DNA segments (see, e.g. Cahill et al. (2006), Front. Biosci. 11:1958-1976). DNA repair by non-homologous end-joining is error-prone and frequently results in the untemplated addition or deletion of DNA sequences at the site of repair. In some instances, cleavage at a target recognition sequence results in NHEJ at a target recognition site. Nuclease-induced cleavage of a target site in the coding sequence of a gene followed by DNA repair by NHEJ can introduce mutations into the coding sequence, such as frameshift mutations, that disrupt gene function. Thus, engineered nucleases can be used to effectively knock-out a gene in a population of cells.

[0519] As used herein, a “chimeric antigen receptor” or “CAR” refers to an engineered receptor that grafts specificity for an antigen onto an immune effector cell (e.g., a human T cell). A chimeric antigen receptor typically comprises an extracellular ligand-binding domain or moiety and an intracellular domain that comprises one or more stimulatory domains. In some embodiments, the extracellular ligand-binding domain or moiety can be in the form of single-chain variable fragments (scFvs) derived from a monoclonal antibody, which provide specificity for a particular epitope or antigen (e.g., an epitope or antigen preferentially present on the surface of a cancer cell or other disease-causing cell or particle). The scFvs can be attached via a linker sequence. The extracellular ligand-binding domain can be specific for any antigen or epitope of interest. In a particular embodiment, the ligand-binding domain is specific for CD19. In other embodiments, the scFvs can be humanized or fully human. The extracellular domain of a chimeric antigen receptor can also comprise an autoantigen (see, Payne et al. (2016) Science, Vol. 353 (6295): 179-184), which can be recognized by autoantigen-specific B cell receptors on B lymphocytes, thus directing T cells to specifically target and kill autoreactive B lymphocytes in antibody-mediated autoimmune diseases. Such CARs can be referred to as chimeric autoantibody receptors (CAARs), and their use is encompassed by the disclosure.

[0520] In some non-limiting embodiments, the extracellular ligand-binding domain of the CAR can have specificity for a tumor-associated surface antigen, such as CD19, CD123, CD22, CS1, CD20, ErbB2 (HER2/neu), FLT3R, carcinoembryonic antigen (CEA), epithelial cell adhesion molecule (EpCAM), epidermal growth factor receptor (EGFR), EGFR variant III (EGFRvlll), CD30, CD40, CD44, CD44v6, disialoganglioside GD2, ductal-epithelial mucine, gp36, TAG-72, glycosphingolipids, glioma-associated antigen, B-human chorionic gonadotropin, alphafetoprotein (AFP), lectin-reactive AFP, thyroglobulin, RAGE-1, MN-CA IX, human telomerase reverse transcriptase, RU1, RU2 (AS), intestinal carboxyl esterase, mut hsp70-2, M-CSF, prostase, prostase specific antigen (PSA), PAP, NY-ESO-1, LAGA-1a, p53, prostein, PSMA, surviving and telomerase, prostate-carcinoma tumor antigen-1 (PCTA-1), MAGE, ELF2M, neutrophil elastase, ephrin B2, insulin growth factor (IGF1)-1, IGF-II, IGFI receptor, mesothelin, a major histocompatibility complex (MHC) molecule presenting a tumor-specific peptide epitope, 5T4, ROR1, Nkp30, NKG2D, tumor stromal antigens, the extra domain A (EDA) and extra domain B (EDB) of fibronectin and the A1 domain of tenascin-C (TnC A1) and fibroblast associated protein (fap); a lineage-specific or tissue specific antigen such as CD3, CD4, CD8, CD24, CD25, CD33, CD34, CD133, CD138, CTLA-4, B7-1 (CD80), B7-2 (CD86), endoglin, a major histocompatibility complex (MHC) molecule, BCMA (CD269, TNFRSF 17), or a virus-specific surface antigen such as an HIV-specific antigen (such as HIV gpl20); an EBV-specific antigen, a CMV-specific antigen, a HPV-specific antigen, a Lasse Virus-specific antigen, an Influenza Virus-specific antigen, as well as any derivate or variant of these surface markers. In a particular embodiment of the invention, the ligand-binding domain is specific for CD19.

[0521] The intracellular stimulatory domain can include one or more cytoplasmic signaling domains which transmit an activation signal to the immune effector cell following antigen binding. The intracellular stimulatory domain can be any intracellular stimulatory domain of interest. Such cytoplasmic signaling domains can include, without limitation, CD3-zeta. The intracellular stimulatory domain can also include one or more intracellular co-stimulatory domains which transmit a proliferative and/or cell-survival signal after ligand binding. The intracellular co-stimulatory domain can be any intracellular co-stimulatory domain of interest. Such intracellular co-stimulatory domains can include, without limitation, a CD28 domain, a 4-1BB domain, an OX40 domain, or a combination thereof. A chimeric antigen receptor can further include additional structural elements, including a transmembrane domain which is attached to the extracellular ligand-binding domain via a hinge or spacer sequence.

[0522] As used herein, an “exogenous T cell receptor” or “exogenous TCR” refers to a TCR whose sequence is introduced into the genome of an immune effector cell (e.g., a human T cell) that may or may not endogenously express the TCR. Expression of an exogenous TCR on an immune effector cell can confer specificity for a specific epitope or antigen (e.g., an epitope or antigen preferentially present on the surface of a cancer cell or other disease-causing cell or particle). Such exogenous T cell receptors can comprise alpha and beta chains or, alternatively, may comprise gamma and delta chains. Exogenous TCRs useful in the disclosure may have specificity to any antigen or epitope of interest.

[0523] As used herein, the term “reduced” refers to any reduction in the expression of an endogenous polypeptide (e.g., beta-2 microglobulin, an endogenous T cell receptor, etc.) at the cell surface of a genetically-modified cell or when compared to a control cell. The term “reduced” can also refer to a reduction in the percentage of cells in a population of cells that express an endogenous polypeptide at the cell surface when compared to a population of control cells. In either case, such a reduction is up to 5%, 10%, 20%, 30%, 40%, 50%, 60%, 70%, 80%, 90%, 95%, or up to 100%. Accordingly, the term “reduced” encompasses both a partial knockdown and a complete knockdown of an endogenous polypeptide.

[0524] As used herein with respect to both amino acid sequences and nucleic acid sequences, the terms “percent identity,” “sequence identity,” “percentage similarity,” “sequence similarity,” and the like, refer to a measure of the degree of similarity of two sequences based upon an alignment of the sequences which maximizes similarity between aligned amino acid residues or nucleotides, and which is a function of the number of identical or similar residues or nucleotides, the number of total residues or nucleotides, and the presence and length of gaps in the sequence alignment. A variety of algorithms and computer programs are available for determining sequence similarity using standard parameters. As used herein, sequence similarity is measured using the BLASTp program for amino acid sequences and the BLASTn program for nucleic acid sequences, both of which are available through the National Center for Biotechnology Information (www.ncbi.nlm.nih.gov), and are described in, for example, Altschul et al. (1990), J Mol. Biol. 215:403-410; Gish and States (1993), Nature Genet. 3:266-272; Madden et al. (1996), Meth. Enzymol. 266:131-141; Altschul et al. (1997), Nucleic Acids Res. 25:33 89-3402); Zhang et al. (2000), J. Comput. Biol. 7(1-2):203-14. As used herein, percent similarity of two amino acid sequences is the score based upon the following parameters for the BLASTp algorithm: word size=3; gap opening penalty=−11; gap extension penalty=−1; and scoring matrix=BLOSUM62. As used herein, percent similarity of two nucleic acid sequences is the score based upon the following parameters for the BLASTn algorithm: word size=11; gap opening penalty=−5; gap extension penalty=−2; match reward=1; and mismatch penalty=−3.

[0525] As used herein with respect to modifications of two proteins or amino acid sequences, the term “corresponding to” is used to indicate that a specified modification in the first protein is a substitution of the same amino acid residue as in the modification in the second protein, and that the amino acid position of the modification in the first proteins corresponds to or aligns with the amino acid position of the modification in the second protein when the two proteins are subjected to standard sequence alignments (e.g., using the BLASTp program). Thus, the modification of residue “X” to amino acid “A” in the first protein will correspond to the modification of residue “Y” to amino acid “A” in the second protein if residues X and Y correspond to each other in a sequence alignment, and despite the fact that X and Y are different numbers.

[0526] As used herein, the term “recognition half-site,” “recognition sequence half-site,” or simply “half-site” means a nucleic acid sequence in a double-stranded DNA molecule which is recognized by a monomer of a homodimeric or heterodimeric meganuclease, or by one subunit of a single-chain meganuclease.

[0527] As used herein, the term “hypervariable region” refers to a localized sequence within a meganuclease monomer or subunit that comprises amino acids with relatively high variability. A hypervariable region can comprise about 50-60 contiguous residues, about 53-57 contiguous residues, or preferably about 56 residues. In some embodiments, the residues of a hypervariable region may correspond to positions 24-79 or positions 215-270 of any one of SEQ ID NOs: 12-126. A hypervariable region can comprise one or more residues that contact DNA bases in a recognition sequence and can be modified to alter base preference of the monomer or subunit. A hypervariable region can also comprise one or more residues that bind to the DNA backbone when the meganuclease associates with a double-stranded DNA recognition sequence. Such residues can be modified to alter the binding affinity of the meganuclease for the DNA backbone and the target recognition sequence. In different embodiments of the disclosure, a hypervariable region may comprise between about 1-21 residues that exhibit variability and can be modified to influence base preference and/or DNA-binding affinity. In some embodiments, variable residues within a hypervariable region correspond to one or more of positions 24, 26, 28, 29, 30, 32, 33, 38, 40, 42, 44, 46, 48, 66, 68, 69, 70, 72, 73, 75, and 77 of any one of SEQ ID NOs:12-126. In other embodiments, variable residues within a hypervariable region correspond to one or more of positions 215, 217, 219, 220, 221, 223, 224, 229, 231, 233, 235, 237, 239, 248, 257, 259, 260, 261, 263, 264, 266, and 268 of any one of SEQ ID NOs:12-126.

[0528] As used herein, the terms “human beta-2 microglobulin gene,” “B2M gene,” and the like, are used interchangeably and refer to the human gene identified by NCBI Gene ID NO. 567 (Accession No. NG_012920.1), which is set forth in SEQ ID NO: 1, as well as naturally-occurring variants of the human beta-2 microglobulin gene which encode a functional B2M polypeptide.

[0529] As used herein, the terms “T cell receptor alpha constant region gene,” “TCR alpha constant region gene,” and the like, are used interchangeably and refer to the human gene identified by NCBI Gene ID NO. 28755, which is set forth in SEQ ID NO: 127, as well as naturally-occurring variants of the T cell receptor alpha constant region gene which encode a functional polypeptide.

[0530] The terms “recombinant DNA construct,” “recombinant construct,” “expression cassette,” “expression construct,” “chimeric construct,” “construct,” and “recombinant DNA fragment” are used interchangeably herein and are nucleic acid fragments. A recombinant construct comprises an artificial combination of nucleic acid fragments, including, without limitation, regulatory and coding sequences that are not found together in nature. For example, a recombinant DNA construct may comprise regulatory sequences and coding sequences that are derived from different sources, or regulatory sequences and coding sequences derived from the same source and arranged in a manner different than that found in nature. Such a construct is used by itself or used in conjunction with a vector.

[0531] As used herein, a “vector” or “recombinant DNA vector” is a construct that includes a replication system and sequences that are capable of transcription and translation of a polypeptide-encoding sequence in a given host cell. If a vector is used then the choice of vector is dependent upon the method that will be used to transform host cells as is well known to those skilled in the art. Vectors can include, without limitation, plasmid vectors and recombinant AAV vectors, or any other vector known in that art suitable for delivering a gene encoding a meganuclease of the disclosure to a target cell. The skilled artisan is well aware of the genetic elements that must be present on the vector in order to successfully transform, select and propagate host cells comprising any of the isolated nucleotides or nucleic acid sequences of the disclosure.

[0532] As used herein, a “vector” can also refer to a viral vector. Viral vectors can include, without limitation, retroviral vectors, lentiviral vectors, adenoviral vectors, and adeno-associated viral vectors (AAV).

[0533] As used herein, a “polycistronic” mRNA refers to a single messenger RNA which comprises two or more coding sequences (i.e., cistrons) and encodes more than one protein. A polycistronic mRNA can comprise any element known in the art to allow for the translation of two or more genes from the same mRNA molecule including, but not limited to, an IRES element, a T2A element, a P2A element, an E2A element, and an F2A element.

[0534] As used herein, a “human T cell” or “T cell” refers to a T cell isolated from a human donor. Human T cells, and cells derived therefrom, include isolated T cells that have not been passaged in culture, T cells that have been passaged and maintained under cell culture conditions without immortalization, and T cells that have been immortalized and is maintained under cell culture conditions indefinitely.

[0535] As used herein, a “control” or “control cell” refers to a cell that provides a reference point for measuring changes in genotype or phenotype of a genetically-modified cell. A control cell may comprise, for example: (a) a wild-type cell, i.e., of the same genotype as the starting material for the genetic alteration which resulted in the genetically-modified cell; (b) a cell of the same genotype as the genetically-modified cell but which has been transformed with a null construct (i.e., with a construct which has no known effect on the trait of interest); or, (c) a cell genetically identical to the genetically-modified cell but which is not exposed to conditions, stimuli, or further genetic modifications that would induce expression of altered genotype or phenotype.

[0536] As used herein, the recitation of a numerical range for a variable is intended to convey that the disclosure is practiced with the variable equal to any of the values within that range. Thus, for a variable which is inherently discrete, the variable is equal to any integer value within the numerical range, including the end-points of the range. Similarly, for a variable which is inherently continuous, the variable is equal to any real value within the numerical range, including the end-points of the range. As an example, and without limitation, a variable which is described as having values between 0 and 2 can take the values 0, 1 or 2 if the variable is inherently discrete, and can take the values 0.0, 0.1, 0.01, 0.001, or any other real values 0 and 2 if the variable is inherently continuous.

### 2.1 Principle of the Invention

[0537] The present disclosure is based, in part, on the hypothesis that engineered nucleases is utilized to recognize and cleave recognition sequences found within the human beta-2 microglobulin gene (SEQ ID NO: 1), such that NHEJ at the cleavage site disrupts expression of the beta-2 microglobulin polypeptide at the cell-surface, thus interfering with assembly and activation of endogenous MHC class I receptors encoded by HLA genes. Moreover, according to the disclosure, an exogenous polynucleotide sequence is inserted into the beta-2 microglobulin gene at the nuclease cleavage site, for example by homologous recombination. In some embodiments, the polynucleotide sequence comprises a sequence of interest that is concurrently expressed in the cell. Moreover, the engineered nucleases of the disclosure is used to knockout cell-surface expression of beta-2 microglobulin in eukaryotic cells that are genetically-modified to exhibit one or more additional knockouts (e.g., knockout of an endogenous T cell receptor) and/or genetically-modified to express one or more polypeptides of interest (e.g., a chimeric antigen receptor or exogenous T cell receptor). Thus, in a preferred embodiment, the present disclosure allows for the production of genetically-modified eukaryotic cell, such as a T cell, that exhibits knockout of both beta-2 microglobulin and an endogenous T cell receptor at the cell surface, while concurrently expressing a chimeric antigen receptor or exogenous T cell receptor. Such cells can exhibit reduced alloreactivity and/or reduced allogenicity when administered to a subject.

### 2.2 Nucleases for Recognizing and Cleaving Recognition Sequences within the Human Beta-2 Microglobulin Gene

[0538] It is known in the art that it is possible to use a site-specific nuclease to make a DNA break in the genome of a living cell, and that such a DNA break can result in permanent modification of the genome via mutagenic NHEJ repair or via homologous recombination with a transgenic DNA sequence. NHEJ can produce mutagenesis at the cleavage site, resulting in inactivation of the allele. NHEJ-associated mutagenesis may inactivate an allele via generation of early stop codons, frameshift mutations producing aberrant non-functional proteins, or could trigger mechanisms such as nonsense-mediated mRNA decay. The use of nucleases to induce mutagenesis via NHEJ can be used to target a specific mutation or a sequence present in a wild-type allele. The use of nucleases to induce a double-strand break in a target locus is known to stimulate homologous recombination, particularly of transgenic DNA sequences flanked by sequences that are homologous to the genomic target. In this manner, exogenous nucleic acid sequences can be inserted into a target locus. Such exogenous nucleic acids can encode, for example, a chimeric antigen receptor, an exogenous TCR, or any sequence or polypeptide of interest.

[0539] In different embodiments, a variety of different types of nuclease are useful for practicing the disclosure. In one embodiment, the disclosure is practiced using recombinant meganucleases. In another embodiment, the disclosure is practiced using a CRISPR nuclease or CRISPR Nickase. Methods for making CRISPRs and CRISPR Nickases that recognize pre-determined DNA sites are known in the art, for example Ran, et al. (2013) Nat Protoc. 8:2281-308. In another embodiment, the disclosure is practiced using TALENs or Compact TALENs. Methods for making TALE domains that bind to pre-determined DNA sites are known in the art, for example Reyon et al. (2012) Nat Biotechnol. 30:460-5. In a further embodiment, the disclosure is practiced using megaTALs.

[0540] In preferred embodiments, the nucleases used to practice the disclosure are single-chain meganucleases. A single-chain meganuclease comprises an N-terminal subunit and a C-terminal subunit joined by a linker peptide. Each of the two domains recognizes half of the recognition sequence (i.e., a recognition half-site) and the site of DNA cleavage is at the middle of the recognition sequence near the interface of the two subunits. DNA strand breaks are offset by four base pairs such that DNA cleavage by a meganuclease generates a pair of four base pair, 3′ single-strand overhangs.

[0541] In some examples, recombinant meganucleases of the disclosure have been engineered to recognize and cleave the B2M 13-14 recognition sequence (SEQ ID NO:2). Such recombinant meganucleases are collectively referred to herein as “B2M 13-14 meganucleases.” Exemplary B2M 13-14 meganucleases are provided in SEQ ID NOs: 12-100.

[0542] In other examples, recombinant meganucleases of the disclosure have been engineered to recognize and cleave the B2M 5-6 recognition sequence (SEQ ID NO:4). Such recombinant meganucleases are collectively referred to herein as “B2M 5-6 meganucleases.” Exemplary B2M 5-6 meganucleases are provided in SEQ ID NOs: 101-113.

[0543] In additional examples, recombinant meganucleases of the disclosure have been engineered to recognize and cleave the B2M 7-8 recognition sequence (SEQ ID NO:6). Such recombinant meganucleases are collectively referred to herein as “B2M 7-8 meganucleases.” Exemplary B2M 7-8 meganucleases are provided in SEQ ID NOs: 114-124.

[0544] In further examples, recombinant meganucleases of the disclosure have been engineered to recognize and cleave the B2M 11-12 recognition sequence (SEQ ID NO:8). Such recombinant meganucleases are collectively referred to herein as “B2M 11-12 meganucleases.” Exemplary B2M 11-12 meganucleases are provided in SEQ ID NOs: 125 and 126.

[0545] Recombinant meganucleases of the disclosure comprise a first subunit, comprising a first hypervariable (HVR1) region, and a second subunit, comprising a second hypervariable (HVR2) region. Further, the first subunit binds to a first recognition half-site in the recognition sequence (e.g., the B2M13, B2M5, B2M7, or B2M11 half-site), and the second subunit binds to a second recognition half-site in the recognition sequence (e.g., the B2M14, B2M6, B2M8, or B2M12 half-site). In embodiments where the recombinant meganuclease is a single-chain meganuclease, the first and second subunits is oriented such that the first subunit, which comprises the HVR1 region and binds the first half-site, is positioned as the N-terminal subunit, and the second subunit, which comprises the HVR2 region and binds the second half-site, is positioned as the C-terminal subunit. In alternative embodiments, the first and second subunits is oriented such that the first subunit, which comprises the HVR1 region and binds the first half-site, is positioned as the C-terminal subunit, and the second subunit, which comprises the HVR2 region and binds the second half-site, is positioned as the N-terminal subunit. Exemplary B2M 13-14 meganucleases of the disclosure are provided in Table 1. Exemplary B2M 5-6 meganucleases of the disclosure are provided in Table 2. Exemplary B2M 7-8 meganucleases of the disclosure are provided in Table 3. Exemplary B2M 11-12 meganucleases of the disclosure are provided in Table 4.

TABLE 1
Exemplary recombinant meganucleases engineered to recognize and cleave the
B2M 13-14 recognition sequence (SEQ ID NO: 2)

| | AA | B2M13 | B2M13 | | B2M14 | B2M14 | |
|---|---|---|---|---|---|---|---|
| | SEQ | Subunit | Subunit | *B2M13 | Subunit | Subunit | *B2M14 |
| Meganuclease | ID | Residues | SEQ ID | Subunit % | Residues | SEQ ID | Subunit % |
| B2M 13-14x.479 | 12 | 198-344 | 132 | 100 | 7-153 | 221 | 100 |
| B2M 13-14x.287 | 13 | 198-344 | 133 | 95.92 | 7-153 | 222 | 99.32 |
| B2M 13-14x.377 | 14 | 198-344 | 134 | 94.56 | 7-153 | 223 | 97.96 |
| B2M 13-14x.169 | 15 | 198-344 | 135 | 95.24 | 7-153 | 224 | 99.32 |
| B2M 13-14x.202 | 16 | 198-344 | 136 | 95.24 | 7-153 | 225 | 97.96 |
| B2M 13-14x.93 | 17 | 198-344 | 137 | 94.56 | 7-153 | 226 | 95.92 |
| B2M 13-14x.93 QE | 18 | 198-344 | 138 | 95.24 | 7-153 | 227 | 95.92 |
| B2M 13-14x.93 EQ | 19 | 198-344 | 139 | 94.56 | 7-153 | 228 | 96.6 |
| B2M 13-14x.93 EE | 20 | 198-344 | 140 | 95.24 | 7-153 | 229 | 96.6 |
| B2M 13-14x.93 | 21 | 198-344 | 141 | 94.56 | 7-153 | 230 | 95.92 |
| QQY66 | | | | | | | |
| B2M 13-14x.93 | 22 | 198-344 | 142 | 94.56 | 7-153 | 231 | 95.24 |
| QQK66 | | | | | | | |
| B2M 13-14x.93 | 23 | 198-344 | 143 | 94.56 | 7-153 | 232 | 95.24 |
| QQR66 | | | | | | | |
| B2M 13-14x.93 | 24 | 198-344 | 144 | 95.24 | 7-153 | 233 | 96.6 |
| EEY66 | | | | | | | |
| B2M 13-14x.93 | 25 | 198-344 | 145 | 95.24 | 7-153 | 234 | 95.92 |
| EEK66 | | | | | | | |
| B2M 13-14x.93 | 26 | 198-344 | 146 | 95.24 | 7-153 | 235 | 95.92 |
| EER66 | | | | | | | |
| B2M 13-14x.93 | 27 | 198-344 | 147 | 94.56 | 7-153 | 236 | 95.92 |
| EQY66 | | | | | | | |
| B2M 13-14x.93 | 28 | 198-344 | 148 | 94.56 | 7-153 | 237 | 95.92 |
| EQK66 | | | | | | | |
| B2M 13-14x.93 | 29 | 198-344 | 149 | 94.56 | 7-153 | 238 | 95.92 |
| EQR66 | | | | | | | |
| B2M 13-14x.3 | 30 | 198-344 | 150 | 91.84 | 7-153 | 239 | 92.52 |
| B2M 13-14x.10 | 31 | 198-344 | 151 | 94.56 | 7-153 | 240 | 93.2 |
| B2M 13-14x.14 | 32 | 198-344 | 152 | 91.84 | 7-153 | 241 | 95.24 |
| B2M 13-14x.22 | 33 | 198-344 | 153 | 93.88 | 7-153 | 242 | 93.2 |
| B2M 13-14x.67 | 34 | 198-344 | 154 | 94.56 | 7-153 | 243 | 93.2 |
| B2M 13-14x.84 | 35 | 198-344 | 155 | 93.88 | 7-153 | 244 | 94.56 |
| B2M 13-14x.85 | 36 | 198-344 | 156 | 94.56 | 7-153 | 245 | 93.2 |
| B2M 13-14x.96 | 37 | 198-344 | 157 | 95.24 | 7-153 | 246 | 96.6 |
| B2M 13-14x.97 | 38 | 198-344 | 158 | 95.24 | 7-153 | 247 | 98.64 |
| B2M 13-14x.102 | 39 | 198-344 | 159 | 95.24 | 7-153 | 248 | 98.64 |
| B2M 13-14x.105 | 40 | 198-344 | 160 | 95.24 | 7-153 | 249 | 98.64 |
| B2M 13-14x.106 | 41 | 198-344 | 161 | 95.24 | 7-153 | 250 | 97.96 |
| B2M 13-14x.115 | 42 | 198-344 | 162 | 95.24 | 7-153 | 251 | 98.64 |
| B2M 13-14x.139 | 43 | 198-344 | 163 | 95.24 | 7-153 | 252 | 95.92 |
| B2M 13-14x.141 | 44 | 198-344 | 164 | 95.24 | 7-153 | 253 | 97.96 |
| B2M 13-14x.146 | 45 | 198-344 | 165 | 95.24 | 7-153 | 254 | 96.6 |
| B2M 13-14x.162 | 46 | 198-344 | 166 | 95.24 | 7-153 | 255 | 97.96 |
| B2M 13-14x.165 | 47 | 198-344 | 167 | 95.24 | 7-153 | 256 | 99.32 |
| B2M 13-14x.178 | 48 | 198-344 | 168 | 95.24 | 7-153 | 257 | 99.32 |
| B2M 13-14x.182 | 49 | 198-344 | 169 | 95.24 | 7-153 | 258 | 98.64 |
| B2M 13-14x.198 | 50 | 198-344 | 170 | 95.24 | 7-153 | 259 | 98.64 |
| B2M 13-14x.199 | 51 | 198-344 | 171 | 95.24 | 7-153 | 260 | 97.96 |
| B2M 13-14x.207 | 52 | 198-344 | 172 | 95.24 | 7-153 | 261 | 96.6 |
| B2M 13-14x.222 | 53 | 198-344 | 173 | 95.24 | 7-153 | 262 | 98.64 |
| B2M 13-14x.245 | 54 | 198-344 | 174 | 95.24 | 7-153 | 263 | 99.32 |
| B2M 13-14x.255 | 55 | 198-344 | 175 | 95.24 | 7-153 | 264 | 99.32 |
| B2M 13-14x.259 | 56 | 198-344 | 176 | 95.24 | 7-153 | 265 | 97.96 |
| B2M 13-14x.275 | 57 | 198-344 | 177 | 95.24 | 7-153 | 266 | 100 |
| B2M 13-14x.280 | 58 | 198-344 | 178 | 95.92 | 7-153 | 267 | 99.32 |
| B2M 13-14x.281 | 59 | 198-344 | 179 | 94.56 | 7-153 | 268 | 99.32 |
| B2M 13-14x.283 | 60 | 198-344 | 180 | 94.56 | 7-153 | 269 | 99.32 |
| B2M 13-14x.285 | 61 | 198-344 | 181 | 95.24 | 7-153 | 270 | 99.32 |
| B2M 13-14x.286 | 62 | 198-344 | 182 | 94.56 | 7-153 | 271 | 99.32 |
| B2M 13-14x.295 | 63 | 198-344 | 183 | 96.6 | 7-153 | 272 | 99.32 |
| B2M 13-14x.301 | 64 | 198-344 | 184 | 95.24 | 7-153 | 273 | 99.32 |
| B2M 13-14x.306 | 65 | 198-344 | 185 | 95.24 | 7-153 | 274 | 99.32 |
| B2M 13-14x.317 | 66 | 198-344 | 186 | 94.56 | 7-153 | 275 | 99.32 |
| B2M 13-14x.325 | 67 | 198-344 | 187 | 95.24 | 7-153 | 276 | 99.32 |
| B2M 13-14x.335 | 68 | 198-344 | 188 | 94.56 | 7-153 | 277 | 99.32 |
| B2M 13-14x.338 | 69 | 198-344 | 189 | 95.24 | 7-153 | 278 | 99.32 |
| B2M 13-14x.347 | 70 | 198-344 | 190 | 95.24 | 7-153 | 279 | 99.32 |
| B2M 13-14x.361 | 71 | 198-344 | 191 | 95.24 | 7-153 | 280 | 99.32 |
| B2M 13-14x.362 | 72 | 198-344 | 192 | 94.56 | 7-153 | 281 | 99.32 |
| B2M 13-14x.365 | 73 | 198-344 | 193 | 95.24 | 7-153 | 282 | 99.32 |
| B2M 13-14x.369 | 74 | 198-344 | 194 | 95.24 | 7-153 | 283 | 99.32 |
| B2M 13-14x.371 | 75 | 198-344 | 195 | 94.56 | 7-153 | 284 | 99.32 |
| B2M 13-14x.372 | 76 | 198-344 | 196 | 95.24 | 7-153 | 285 | 99.32 |
| B2M 13-14x.375 | 77 | 198-344 | 197 | 95.92 | 7-153 | 286 | 97.96 |
| B2M 13-14x.378 | 78 | 198-344 | 198 | 95.92 | 7-153 | 287 | 97.96 |
| B2M 13-14x.385 | 79 | 198-344 | 199 | 95.92 | 7-153 | 288 | 97.96 |
| B2M 13-14x.392 | 80 | 198-344 | 200 | 94.56 | 7-153 | 289 | 97.96 |
| B2M 13-14x.432 | 81 | 198-344 | 201 | 96.6 | 7-153 | 290 | 97.96 |
| B2M 13-14x.433 | 82 | 198-344 | 202 | 94.56 | 7-153 | 291 | 97.96 |
| B2M 13-14x.440 | 83 | 198-344 | 203 | 94.56 | 7-153 | 292 | 97.96 |
| B2M 13-14x.449 | 84 | 198-344 | 204 | 94.56 | 7-153 | 293 | 97.96 |
| B2M 13-14x.456 | 85 | 198-344 | 205 | 94.56 | 7-153 | 294 | 97.96 |
| B2M 13-14x.457 | 86 | 198-344 | 206 | 95.92 | 7-153 | 295 | 97.96 |
| B2M 13-14x.459 | 87 | 198-344 | 207 | 95.24 | 7-153 | 296 | 97.96 |
| B2M 13-14x.464 | 88 | 198-344 | 208 | 96.6 | 7-153 | 297 | 97.96 |
| B2M 13-14x.465 | 89 | 198-344 | 209 | 96.6 | 7-153 | 298 | 97.96 |
| B2M 13-14x.470 | 90 | 198-344 | 210 | 94.56 | 7-153 | 299 | 100 |
| B2M 13-14x.471 | 91 | 198-344 | 211 | 96.6 | 7-153 | 300 | 100 |
| B2M 13-14x.540 | 92 | 198-344 | 212 | 95.92 | 7-153 | 301 | 100 |
| B2M 13-14x.543 | 93 | 198-344 | 213 | 94.56 | 7-153 | 302 | 100 |
| B2M 13-14x.551 | 94 | 198-344 | 214 | 94.56 | 7-153 | 303 | 100 |
| B2M 13-14x.554 | 95 | 198-344 | 215 | 95.92 | 7-153 | 304 | 100 |
| B2M 13-14x.556 | 96 | 198-344 | 216 | 94.56 | 7-153 | 305 | 100 |
| B2M 13-14x.76 | 97 | 7-153 | 217 | 91.16 | 198-344 | 306 | 91.84 |
| B2M 13-14x.82 | 98 | 7-153 | 218 | 93.88 | 198-344 | 307 | 92.52 |
| B2M 13-14x.31 | 99 | 7-153 | 219 | 89.8 | 198-344 | 308 | 91.84 |
| B2M 13-14x.32 | 100 | 7-153 | 220 | 93.88 | 198-344 | 309 | 94.56 |

*“B2M13 Subunit %” and “B2M14 Subunit %” represent the amino acid sequence identity between the B2M13-binding and B2M14-binding subunit regions of each meganuclease and the B2M13-binding and B2M14-binding subunit regions, respectively, of the B2M 13-14x.479 meganuclease.

TABLE 2
Exemplary recombinant meganucleases engineered to recognize and cleave the
B2M 5-6 recognition sequence (SEQ ID NO: 4)

| | | B2M5 | B2M5 | | B2M6 | B2M6 | |
|---|---|---|---|---|---|---|---|
| | AA SEQ | Subunit | Subunit | *B2M5 | Subunit | Subunit | *B2M6 |
| Meganuclease | ID | Residues | SEQ ID | Subunit % | Residues | SEQ ID | Subunit % |
| B2M 5-6x.14 | 101 | 7-153 | 310 | 100 | 198-344 | 323 | 100 |
| B2M 5-6x.5 | 102 | 7-153 | 311 | 94.56 | 198-344 | 324 | 90.48 |
| B2M 5-6x.6 | 103 | 7-153 | 312 | 100 | 198-344 | 325 | 92.52 |
| B2M 5-6x.13 | 104 | 7-153 | 313 | 93.2 | 198-344 | 326 | 93.88 |
| B2M 5-6x.22 | 105 | 7-153 | 314 | 91.16 | 198-344 | 327 | 93.2 |
| B2M 5-6x.31 | 106 | 7-153 | 315 | 92.52 | 198-344 | 328 | 92.52 |
| B2M 5-6x.69 | 107 | 7-153 | 316 | 93.2 | 198-344 | 329 | 93.88 |
| B2M 5-6x.73 | 108 | 7-153 | 317 | 93.2 | 198-344 | 330 | 93.2 |
| B2M 5-6x.85 | 109 | 7-153 | 318 | 91.16 | 198-344 | 331 | 92.52 |
| B2M 5-6x.86 | 110 | 7-153 | 319 | 100 | 198-344 | 332 | 91.16 |
| B2M 5-6x.91 | 111 | 7-153 | 320 | 92.52 | 198-344 | 333 | 93.88 |
| B2M 5-6x.28 | 112 | 198-344 | 321 | 91.16 | 7-153 | 334 | 93.2 |
| B2M 5-6x.3 | 113 | 198-344 | 322 | 91.16 | 7-153 | 335 | 92.52 |

*“B2M5 Subunit %” and “B2M6 Subunit %” represent the amino acid sequence identity between the B2M5-binding and B2M6-binding subunit regions of each meganuclease and the B2M5-binding and B2M6-binding subunit regions, respectively, of the B2M 5-6x.14 meganuclease.

TABLE 3
Exemplary recombinant meganucleases engineered to recognize and cleave the
B2M 7-8 recognition sequence (SEQ ID NO: 6)

| | | B2M7 | B2M7 | | B2M8 | B2M8 | |
|---|---|---|---|---|---|---|---|
| | AA SEQ | Subunit | Subunit | *B2M7 | Subunit | Subunit | *B2M8 |
| Meganuclease | ID | Residues | SEQ ID | Subunit % | Residues | SEQ ID | Subunit % |
| B2M 7-8x.88 | 114 | 7-153 | 336 | 100 | 198-344 | 347 | 100 |
| B2M 7-8x.7 | 115 | 7-153 | 337 | 95.92 | 198-344 | 348 | 92.52 |
| B2M 7-8x.23 | 116 | 7-153 | 338 | 94.56 | 198-344 | 349 | 93.88 |
| B2M 7-8x.30 | 117 | 7-153 | 339 | 90.48 | 198-344 | 350 | 90.48 |
| B2M 7-8x.53 | 118 | 7-153 | 340 | 95.24 | 198-344 | 351 | 93.2 |
| B2M 7-8x.2 | 119 | 198-344 | 341 | 99.32 | 7-153 | 352 | 100 |
| B2M 7-8x.3 | 120 | 198-344 | 342 | 96.6 | 7-153 | 353 | 93.88 |
| B2M 7-8x.6 | 121 | 198-344 | 343 | 93.88 | 7-153 | 354 | 93.2 |
| B2M 7-8x.25 | 122 | 198-344 | 344 | 93.2 | 7-153 | 355 | 93.2 |
| B2M 7-8x.78 | 123 | 198-344 | 345 | 95.92 | 7-153 | 356 | 96.6 |
| B2M 7-8x.85 | 124 | 198-344 | 346 | 96.6 | 7-153 | 357 | 93.88 |

*“B2M7 Subunit %” and “B2M8 Subunit %” represent the amino acid sequence identity between the B2M7-binding and B2M8-binding subunit regions of each meganuclease and the B2M7-binding and B2M8-binding subunit regions, respectively, of the B2M 7-8x.88 meganuclease.

TABLE 4
Exemplary recombinant meganucleases engineered to recognize and cleave the
B2M 11-12 recognition sequence (SEQ ID NO: 8)

| | | B2M11 | B2M11 | | B2M12 | B2M12 | |
|---|---|---|---|---|---|---|---|
| | AA | Subunit | Subunit | *B2M11 | Subunit | Subunit | *B2M12 |
| Meganuclease | SEQ ID | Residues | SEQ ID | Subunit % | Residues | SEQ ID | Subunit % |
| B2M 11-12x.45 | 125 | 7-153 | 358 | 100 | 198-344 | 360 | 100 |
| B2M 11-12x.2 | 126 | 198-344 | 359 | 99 | 7-153 | 361 | 99 |

*“B2M11 Subunit %” and “B2M12 Subunit %” represent the amino acid sequence identity between the B2M11-binding and B2M12-binding subunit regions of each meganuclease and the B2M11-binding and B2M12-binding subunit regions, respectively, of the B2M 11-12x.45 meganuclease.

### 2.3 Methods for Producing Genetically-Modified Cells

[0546] The disclosure provides methods for producing genetically-modified cells using engineered nucleases that recognize and cleave recognition sequences found within the human beta-2 microglobulin gene (SEQ ID NO: 1). Cleavage at such recognition sequences can allow for NHEJ at the cleavage site and disrupted expression of the beta-2 microglobulin polypeptide, thus interfering with assembly and activation of endogenous MHC class I receptors encoded by HLA genes. Additionally, cleavage at such recognition sequences can further allow for homologous recombination of exogenous nucleic acid sequences directly into the beta-2 microglobulin gene.

[0547] In some aspects, the disclosure further provides methods for producing genetically-modified eukaryotic cells that have reduced cell-surface expression of an endogenous T cell receptor. Such methods utilize an endonuclease engineered to recognize and cleave a recognition sequence located in a gene encoding a component of an endogenous T cell receptor. Such a gene can include, without limitation, the gene encoding the human T cell receptor alpha constant region gene (SEQ ID NO: 127). Endonucleases useful in the method can include, without limitation, recombinant meganucleases, CRISPRs, TALENs, compact TALENs, zinc finger nucleases (ZFNs), megaTALs. In some embodiments, the endonuclease is a recombinant meganuclease, and the meganuclease recognition sequence comprises any one of SEQ ID NOs: 128-130. Recombinant meganucleases useful for recognizing and cleaving a recognition sequence in the human T cell receptor alpha constant region gene can include, without limitation, those disclosed in U.S. Application Nos. 62/237,382 and 62/237,394. Cleavage at TCR recognition sequences can allow for NHEJ at the cleavage site and disrupted expression of the endogenous T cell receptor. Additionally, cleavage at TCR recognition sequences can further allow for homologous recombination of exogenous nucleic acid sequences directly into targeted gene.

[0548] Engineered nucleases of the disclosure is delivered into a cell in the form of protein or, preferably, as a nucleic acid encoding the engineered nuclease. Such nucleic acid is DNA (e.g., circular or linearized plasmid DNA or PCR products) or RNA. For embodiments in which the engineered nuclease coding sequence is delivered in DNA form, it should be operably linked to a promoter to facilitate transcription of the meganuclease gene. Mammalian promoters suitable for the disclosure include constitutive promoters such as the cytomegalovirus early (CMV) promoter (Thomsen et al. (1984), Proc Natl Acad Sci USA. 81(3):659-63) or the SV40 early promoter (Benoist and Chambon (1981), Nature. 290(5804):304-10) as well as inducible promoters such as the tetracycline-inducible promoter (Dingermann et al. (1992), Mol Cell Biol. 12(9):4038-45).

[0549] In some embodiments, mRNA encoding the engineered nuclease is delivered to the cell because this reduces the likelihood that the gene encoding the engineered nuclease will integrate into the genome of the cell. Such mRNA encoding an engineered nuclease is produced using methods known in the art such as in vitro transcription. In some embodiments, the mRNA is capped using 7-methyl-guanosine. In some embodiments, the mRNA is polyadenylated.

[0550] In particular embodiments, an mRNA encoding an engineered nuclease of the disclosure is a polycistronic mRNA encoding two or more nucleases which are simultaneously expressed in the cell. A polycistronic mRNA can encode two or more nucleases of the disclosure which target different recognition sequences in the same target gene. Alternatively, a polycistronic mRNA can encode one or more nucleases of the disclosure and a second nuclease targeting a separate recognition sequence positioned in the same gene, or a second recognition sequence positioned in a second gene such that cleavage sites are produced in both genes. A polycistronic mRNA can comprise any element known in the art to allow for the translation of two genes (i.e., cistrons) from the same mRNA molecule including, but not limited to, an IRES element (e.g., SEQ ID NO:362), a T2A element (e.g., SEQ ID NO:363), a P2A element (e.g., SEQ ID NO:364), an E2A element (e.g., SEQ ID NO:365), and an F2A element (e.g., SEQ ID NO:366). disclosure

[0551] Purified nuclease proteins can be delivered into cells to cleave genomic DNA, which allows for homologous recombination or non-homologous end-joining at the cleavage site with a sequence of interest, by a variety of different mechanisms known in the art.

[0552] In some embodiments, engineered nuclease proteins, or DNA/mRNA encoding engineered nucleases, are coupled to a cell penetrating peptide or targeting ligand to facilitate cellular uptake. Examples of cell penetrating peptides known in the art include poly-arginine (Jearawiriyapaisarn, et al. (2008) Mol Ther. 16:1624-9), TAT peptide from the HIV virus (Hudecz et al. (2005), Med. Res. Rev. 25: 679-736), MPG (Simeoni, et al. (2003) Nucleic Acids Res. 31:2717-2724), Pep-1 (Deshayes et al. (2004) Biochemistry 43: 7698-7706, and HSV-1 VP-22 (Deshayes et al. (2005) Cell Mol Life Sci. 62:1839-49. In an alternative embodiment, engineered nucleases, or DNA/mRNA encoding engineered nucleases, are coupled covalently or non-covalently to an antibody that recognizes a specific cell-surface receptor expressed on target cells such that the nuclease protein/DNA/mRNA binds to and is internalized by the target cells. Alternatively, engineered nuclease protein/DNA/mRNA is coupled covalently or non-covalently to the natural ligand (or a portion of the natural ligand) for such a cell-surface receptor. (McCall, et al. (2014) Tissue Barriers. 2(4):e944449; Dinda, et al. (2013) Curr Pharm Biotechnol. 14:1264-74; Kang, et al. (2014) Curr Pharm Biotechnol. 15(3):220-30; Qian et al. (2014) Expert Opin Drug Metab Toxicol. 10(11): 1491-508).

[0553] In some embodiments, engineered nuclease proteins, or DNA/mRNA encoding engineered nucleases, are coupled covalently or, preferably, non-covalently to a nanoparticle or encapsulated within such a nanoparticle using methods known in the art (Sharma, et al. (2014) Biomed Res Int. 2014). A nanoparticle is a nanoscale delivery system whose length scale is <1 μm, preferably <100 nm. Such nanoparticles is designed using a core composed of metal, lipid, polymer, or biological macromolecule, and multiple copies of the recombinant meganuclease proteins, mRNA, or DNA is attached to or encapsulated with the nanoparticle core. This increases the copy number of the protein/mRNA/DNA that is delivered to each cell and, so, increases the intracellular expression of each engineered nuclease to maximize the likelihood that the target recognition sequences will be cut. The surface of such nanoparticles is further modified with polymers or lipids (e.g., chitosan, cationic polymers, or cationic lipids) to form a core-shell nanoparticle whose surface confers additional functionalities to enhance cellular delivery and uptake of the payload (Jian et al. (2012) Biomaterials. 33(30): 7621-30). Nanoparticles may additionally be advantageously coupled to targeting molecules to direct the nanoparticle to the appropriate cell type and/or increase the likelihood of cellular uptake. Examples of such targeting molecules include antibodies specific for cell-surface receptors and the natural ligands (or portions of the natural ligands) for cell surface receptors.

[0554] In some embodiments, the engineered nucleases or DNA/mRNA encoding the engineered nucleases, are encapsulated within liposomes or complexed using cationic lipids (see, e.g., Lipofectamine™, Life Technologies Corp., Carlsbad, Calif.; Zuris et al. (2015) Nat Biotechnol. 33: 73-80; Mishra et al. (2011) J Drug Deliv. 2011:863734). The liposome and lipoplex formulations can protect the payload from degradation, and facilitate cellular uptake and delivery efficiency through fusion with and/or disruption of the cellular membranes of the cells.

[0555] In some embodiments, engineered nuclease proteins, or DNA/mRNA encoding engineered nucleases, are encapsulated within polymeric scaffolds (e.g., PLGA) or complexed using cationic polymers (e.g., PEI, PLL) (Tamboli et al. (2011) Ther Deliv. 2(4): 523-536).

[0556] In some embodiments, engineered nuclease proteins, or DNA/mRNA encoding engineered nucleases, are combined with amphiphilic molecules that self-assemble into micelles (Tong et al. (2007) J Gene Med. 9(11): 956-66). Polymeric micelles may include a micellar shell formed with a hydrophilic polymer (e.g., polyethyleneglycol) that can prevent aggregation, mask charge interactions, and reduce nonspecific interactions outside of the cell.

[0557] In some embodiments, engineered nuclease proteins, or DNA/mRNA encoding engineered nucleases, are formulated into an emulsion or a nanoemulsion (i.e., having an average particle diameter of <Inm) for delivery to the cell. The term “emulsion” refers to, without limitation, any oil-in-water, water-in-oil, water-in-oil-in-water, or oil-in-water-in-oil dispersions or droplets, including lipid structures that can form as a result of hydrophobic forces that drive apolar residues (e.g., long hydrocarbon chains) away from water and polar head groups toward water, when a water immiscible phase is mixed with an aqueous phase. These other lipid structures include, but are not limited to, unilamellar, paucilamellar, and multilamellar lipid vesicles, micelles, and lamellar phases. Emulsions are composed of an aqueous phase and a lipophilic phase (typically containing an oil and an organic solvent). Emulsions also frequently contain one or more surfactants. Nanoemulsion formulations are well known, e.g., as described in US Patent Application Nos. 2002/0045667 and 2004/0043041, and U.S. Pat. Nos. 6,015,832, 6,506,803, 6,635,676, and 6,559,189, each of which is incorporated herein by reference in its entirety.

[0558] In some embodiments, engineered nuclease proteins, or DNA/mRNA encoding engineered nucleases, are covalently attached to, or non-covalently associated with, multifunctional polymer conjugates, DNA dendrimers, and polymeric dendrimers (Mastorakos et al. (2015) Nanoscale. 7(9): 3845-56; Cheng et al. (2008) J Pharm Sci. 97(1): 123-43). The dendrimer generation can control the payload capacity and size, and can provide a high payload capacity. Moreover, display of multiple surface groups is leveraged to improve stability and reduce nonspecific interactions.

[0559] In some embodiments, genes encoding an engineered nuclease are introduced into a cell using a viral vector. Such vectors are known in the art and include retroviral vectors, lentiviral vectors, adenoviral vectors, and adeno-associated virus (AAV) vectors (reviewed in Vannucci, et al. (2013 New Microbiol. 36:1-22). Recombinant AAV vectors useful in the disclosure can have any serotype that allows for transduction of the virus into the cell and insertion of the nuclease gene into the cell genome. In particular embodiments, recombinant AAV vectors have a serotype of AAV2 or AAV6. Recombinant AAV vectors can also be self-complementary such that they do not require second-strand DNA synthesis in the host cell (McCarty, et al. (2001) Gene Ther. 8:1248-54).

[0560] If the engineered nuclease genes are delivered in DNA form (e.g. plasmid) and/or via a viral vector (e.g. AAV) they must be operably linked to a promoter. In some embodiments, this is a viral promoter such as endogenous promoters from the viral vector (e.g. the LTR of a lentiviral vector) or the well-known cytomegalovirus- or SV40 virus-early promoters. In a preferred embodiment, nuclease genes are operably linked to a promoter that drives gene expression preferentially in the target cell (e.g., a human T cell).

[0561] The disclosure further provides for the introduction of an exogenous nucleic acid into the cell, such that the exogenous nucleic acid sequence is inserted into the beta-2 microglobulin gene at a nuclease cleavage site. In some embodiments, the exogenous nucleic acid comprises a 5′ homology arm and a 3′ homology arm to promote recombination of the nucleic acid sequence into the cell genome at the nuclease cleavage site.

[0562] Exogenous nucleic acids of the disclosure is introduced into the cell by any of the means previously discussed. In a particular embodiment, exogenous nucleic acids are introduced by way of a viral vector, preferably a recombinant AAV vector. Recombinant AAV vectors useful for introducing an exogenous nucleic acid can have any serotype that allows for transduction of the virus into the cell and insertion of the exogenous nucleic acid sequence into the cell genome. In particular embodiments, the recombinant AAV vectors have a serotype of AAV2 or AAV6. The recombinant AAV vectors can also be self-complementary such that they do not require second-strand DNA synthesis in the host cell.

[0563] In another particular embodiment, an exogenous nucleic acid is introduced into the cell using a single-stranded DNA template. The single-stranded DNA can comprise the exogenous nucleic acid and, in preferred embodiments, can comprise 5′ and 3′ homology arms to promote insertion of the nucleic acid sequence into the nuclease cleavage site by homologous recombination. The single-stranded DNA can further comprise a 5′ AAV inverted terminal repeat (ITR) sequence 5′ upstream of the 5′ homology arm, and a 3′ AAV ITR sequence 3′ downstream of the 3′ homology arm.

### 2.4 Pharmaceutical Compositions

[0564] In some embodiments, the disclosure provides a pharmaceutical composition comprising a genetically-modified cell, or a population of genetically-modified cells, of the disclosure and a pharmaceutical carrier. Such pharmaceutical compositions is prepared in accordance with known techniques. See, e.g., Remington, The Science And Practice of Pharmacy (21^{st} ed. 2005). In the manufacture of a pharmaceutical formulation according to the disclosure, cells are typically admixed with a pharmaceutically acceptable carrier and the resulting composition is administered to a subject. The carrier must, of course, be acceptable in the sense of being compatible with any other ingredients in the formulation and must not be deleterious to the subject. In some embodiments, pharmaceutical compositions of the disclosure can further comprise one or more additional agents useful in the treatment of a disease in the subject. In additional embodiments, where the genetically-modified cell is a genetically-modified human T cell (or a cell derived therefrom), pharmaceutical compositions of the disclosure can further include biological molecules, such as cytokines (e.g., IL-2, IL-7, IL-15, and/or IL-21), which promote in vivo cell proliferation and engraftment. Pharmaceutical compositions comprising genetically-modified cells of the disclosure is administered in the same composition as an additional agent or biological molecule or, alternatively, is co-administered in separate compositions.

[0565] Pharmaceutical compositions of the disclosure is useful for treating any disease state that is targeted by T cell adoptive immunotherapy. In a particular embodiment, the pharmaceutical compositions of the disclosure are useful in the treatment of cancer. Such cancers can include, without limitation, carcinoma, lymphoma, sarcoma, blastomas, leukemia, cancers of B-cell origin, breast cancer, gastric cancer, neuroblastoma, osteosarcoma, lung cancer, melanoma, prostate cancer, colon cancer, renal cell carcinoma, ovarian cancer, rhabdomyo sarcoma, leukemia, and Hodgkin's lymphoma. In certain embodiments, cancers of B-cell origin include, without limitation, B-lineage acute lymphoblastic leukemia, B-cell chronic lymphocytic leukemia, and B-cell non-Hodgkin's lymphoma.

### 2.5 Methods for Producing Recombinant AAV Vectors

[0566] In some embodiments, the disclosure provides recombinant AAV vectors for use in the methods of the disclosure. Recombinant AAV vectors are typically produced in mammalian cell lines such as HEK-293. Because the viral cap and rep genes are removed from the vector to prevent its self-replication to make room for the therapeutic gene(s) to be delivered (e.g. the endonuclease gene), it is necessary to provide these in trans in the packaging cell line. In addition, it is necessary to provide the “helper” (e.g. adenoviral) components necessary to support replication (Cots D, Bosch A, Chillon M (2013) Curr. Gene Ther. 13(5): 370-81). Frequently, recombinant AAV vectors are produced using a triple-transfection in which a cell line is transfected with a first plasmid encoding the “helper” components, a second plasmid comprising the cap and rep genes, and a third plasmid comprising the viral ITRs containing the intervening DNA sequence to be packaged into the virus. Viral particles comprising a genome (ITRs and intervening gene(s) of interest) encased in a capsid are then isolated from cells by freeze-thaw cycles, sonication, detergent, or other means known in the art. Particles are then purified using cesium-chloride density gradient centrifugation or affinity chromatography and subsequently delivered to the gene(s) of interest to cells, tissues, or an organism such as a human patient.

[0567] Because recombinant AAV particles are typically produced (manufactured) in cells, precautions must be taken in practicing the current disclosure to ensure that the site-specific endonuclease is NOT expressed in the packaging cells. Because the viral genomes of the disclosure comprise a recognition sequence for the endonuclease, any endonuclease expressed in the packaging cell line will be capable of cleaving the viral genome before it is packaged into viral particles. This will result in reduced packaging efficiency and/or the packaging of fragmented genomes. Several approaches are used to prevent endonuclease expression in the packaging cells, including:
[0568] 1. The endonuclease is placed under the control of a tissue-specific promoter that is not active in the packaging cells. For example, if a viral vector is developed for delivery of (an) endonuclease gene(s) to muscle tissue, a muscle-specific promoter is used. Examples of muscle-specific promoters include C5-12 (Liu, et al. (2004) Hum Gene Ther. 15:783-92), the muscle-specific creatine kinase (MCK) promoter (Yuasa, et al. (2002) Gene Ther. 9:1576-88), or the smooth muscle 22 (SM22) promoter (Haase, et al. (2013) BMC Biotechnol. 13:49-54). Examples of CNS (neuron)-specific promoters include the NSE, Synapsin, and MeCP2 promoters (Lentz, et al. (2012) Neurobiol Dis. 48:179-88). Examples of liver-specific promoters include albumin promoters (such as Palb), human α1-antitrypsin (such as PalAT), and hemopexin (such as Phpx) (Kramer, M G et al., (2003) Mol. Therapy 7:375-85). Examples of eye-specific promoters include opsin, and corneal epithelium-specific K12 promoters (Martin K R G, Klein R L, and Quigley H A (2002) Methods (28): 267-75) (Tong Y, et al., (2007) J Gene Med, 9:956-66). These promoters, or other tissue-specific promoters known in the art, are not highly-active in HEK-293 cells and, thus, will not expected to yield significant levels of endonuclease gene expression in packaging cells when incorporated into viral vectors of the present disclosure. Similarly, the viral vectors of the present disclosure contemplate the use of other cell lines with the use of incompatible tissue specific promoters (i.e., the well-known HeLa cell line (human epithelial cell) and using the liver-specific hemopexin promoter). Other examples of tissue specific promoters include: synovial sarcomas PDZD4 (cerebellum), C6 (liver), ASB5 (muscle), PPP1R12B (heart), SLC5A12 (kidney), cholesterol regulation APOM (liver), ADPRHL1 (heart), and monogenic malformation syndromes TP73L (muscle). (Jacox E, et al., (2010) PLoS One v.5(8):e12274).
[0569] 2. Alternatively, the vector is packaged in cells from a different species in which the endonuclease is not likely to be expressed. For example, viral particles is produced in microbial, insect, or plant cells using mammalian promoters, such as the well-known cytomegalovirus- or SV40 virus-early promoters, which are not active in the non-mammalian packaging cells. In a preferred embodiment, viral particles are produced in insect cells using the baculovirus system as described by Gao, et al. (Gao, H., et al. (2007) J. Biotechnol. 131(2): 138-43). An endonuclease under the control of a mammalian promoter is unlikely to be expressed in these cells (Airenne, K J, et al. (2013)Mol. Ther. 21(4):739-49). Moreover, insect cells utilize different mRNA splicing motifs than mammalian cells. Thus, it is possible to incorporate a mammalian intron, such as the human growth hormone (HGH) intron or the SV40 large T antigen intron, into the coding sequence of an endonuclease. Because these introns are not spliced efficiently from pre-mRNA transcripts in insect cells, insect cells will not express a functional endonuclease and will package the full-length genome. In contrast, mammalian cells to which the resulting recombinant AAV particles are delivered will properly splice the pre-mRNA and will express functional endonuclease protein. Haifeng Chen has reported the use of the HGH and SV40 large T antigen introns to attenuate expression of the toxic proteins barnase and diphtheria toxin fragment A in insect packaging cells, enabling the production of recombinant AAV vectors carrying these toxin genes (Chen, H (2012) Mol Ther Nucleic Acids. 1(11): e57).
[0570] 3. The endonuclease gene is operably linked to an inducible promoter such that a small-molecule inducer is required for endonuclease expression. Examples of inducible promoters include the Tet-On system (Clontech; Chen H., et al., (2015) BMC Biotechnol. 15(1):4)) and the RheoSwitch system (Intrexon; Sowa G., et al., (2011) Spine, 36(10): E623-8). Both systems, as well as similar systems known in the art, rely on ligand-inducible transcription factors (variants of the Tet Repressor and Ecdysone receptor, respectively) that activate transcription in response to a small-molecule activator (Doxycycline or Ecdysone, respectively). Practicing the current disclosure using such ligand-inducible transcription activators includes: 1) placing the endonuclease gene under the control of a promoter that responds to the corresponding transcription factor, the endonuclease gene having (a) binding site(s) for the transcription factor; and 2) including the gene encoding the transcription factor in the packaged viral genome The latter step is necessary because the endonuclease will not be expressed in the target cells or tissues following recombinant AAV delivery if the transcription activator is not also provided to the same cells. The transcription activator then induces endonuclease gene expression only in cells or tissues that are treated with the cognate small-molecule activator. This approach is advantageous because it enables endonuclease gene expression to be regulated in a spatio-temporal manner by selecting when and to which tissues the small-molecule inducer is delivered. However, the requirement to include the inducer in the viral genome, which has significantly limited carrying capacity, creates a drawback to this approach.
[0571] 4. In another preferred embodiment, recombinant AAV particles are produced in a mammalian cell line that expresses a transcription repressor that prevents expression of the endonuclease. Transcription repressors are known in the art and include the Tet-Repressor, the Lac-Repressor, the Cro repressor, and the Lambda-repressor. Many nuclear hormone receptors such as the ecdysone receptor also act as transcription repressors in the absence of their cognate hormone ligand. To practice the current disclosure, packaging cells are transfected/transduced with a vector encoding a transcription repressor and the endonuclease gene in the viral genome (packaging vector) is operably linked to a promoter that is modified to comprise binding sites for the repressor such that the repressor silences the promoter. The gene encoding the transcription repressor is placed in a variety of positions. It is encoded on a separate vector; it is incorporated into the packaging vector outside of the ITR sequences; it is incorporated into the cap/rep vector or the adenoviral helper vector; or, most preferably, it is stably integrated into the genome of the packaging cell such that it is expressed constitutively. Methods to modify common mammalian promoters to incorporate transcription repressor sites are known in the art. For example, Chang and Roninson modified the strong, constitutive CMV and RSV promoters to comprise operators for the Lac repressor and showed that gene expression from the modified promoters was greatly attenuated in cells expressing the repressor (Chang BD, and Roninson IB (1996) Gene 183:137-42). The use of a non-human transcription repressor ensures that transcription of the endonuclease gene will be repressed only in the packaging cells expressing the repressor and not in target cells or tissues transduced with the resulting recombinant AAV vector.

### 2.6 Engineered Nuclease Variants

[0572] Embodiments of the disclosure encompass the engineered nucleases, and particularly the recombinant meganucleases, described herein, and variants thereof. Further embodiments of the disclosure encompass isolated polynucleotides comprising a nucleic acid sequence encoding the recombinant meganucleases described herein, and variants of such polynucleotides.

[0573] As used herein, “variants” is intended to mean substantially similar sequences. A “variant” polypeptide is intended to mean a polypeptide derived from the “native” polypeptide by deletion or addition of one or more amino acids at one or more internal sites in the native protein and/or substitution of one or more amino acids at one or more sites in the native polypeptide. As used herein, a “native” polynucleotide or polypeptide comprises a parental sequence from which variants are derived. Variant polypeptides encompassed by the embodiments are biologically active. That is, they continue to possess the desired biological activity of the native protein; i.e., the ability to recognize and cleave recognition sequences found in the human beta-2 microglobulin gene (SEQ ID NO: 1), including, for example, the B2M 13-14 recognition sequence (SEQ ID NO:2), the B2M 5-6 recognition sequence (SEQ ID NO:4), the B2M 7-8 recognition sequence (SEQ ID NO:6), and the B2M 11-12 recognition sequence (SEQ ID NO:8). Such variants may result, for example, from human manipulation. Biologically active variants of a native polypeptide of the embodiments (e.g., SEQ ID NOs: 12-126), or biologically active variants of the recognition half-site binding subunits described herein (e.g., SEQ ID NOs: 132-361), will have at least about 40%, about 45%, about 50%, about 55%, about 60%, about 65%, about 70%, about 75%, about 80%, about 85%, about 90%, about 91%, about 92%, about 93%, about 94%, about 95%, about 96%, about 97%, about 98%, or about 99%, sequence identity to the amino acid sequence of the native polypeptide or native subunit, as determined by sequence alignment programs and parameters described elsewhere herein. A biologically active variant of a polypeptide or subunit of the embodiments may differ from that polypeptide or subunit by as few as about 1-40 amino acid residues, as few as about 1-20, as few as about 1-10, as few as about 5, as few as 4, 3, 2, or even 1 amino acid residue.

[0574] The polypeptides of the embodiments is altered in various ways including amino acid substitutions, deletions, truncations, and insertions. Methods for such manipulations are generally known in the art. For example, amino acid sequence variants are prepared by mutations in the DNA. Methods for mutagenesis and polynucleotide alterations are well known in the art. See, for example, Kunkel (1985) Proc. Natl. Acad. Sci. USA 82:488-492; Kunkel et al. (1987) Methods in Enzymol. 154:367-382; U.S. Pat. No. 4,873,192; Walker and Gaastra, eds. (1983) Techniques in Molecular Biology (MacMillan Publishing Company, New York) and the references cited therein. Guidance as to appropriate amino acid substitutions that do not affect biological activity of the protein of interest is found in the model of Dayhoff et al. (1978) Atlas of Protein Sequence and Structure (Natl. Biomed. Res. Found., Washington, D.C.), herein incorporated by reference. Conservative substitutions, such as exchanging one amino acid with another having similar properties, is optimal.

[0575] A substantial number of amino acid modifications to the DNA recognition domain of the wild-type I-CreI meganuclease have previously been identified (e.g., U.S. Pat. No. 8,021,867) which, singly or in combination, result in recombinant meganucleases with specificities altered at individual bases within the DNA recognition sequence half-site, such that the resulting rationally-designed meganucleases have half-site specificities different from the wild-type enzyme. Table 5 provides potential substitutions that can be made in a recombinant meganuclease monomer or subunit to enhance specificity based on the base present at each half-site position (−1 through −9) of a recognition half-site. Such substitutions are incorporated into variants of the meganucleases disclosed herein.

TABLE 5

| | Favored Sense-Strand Base | | | | | | | | | | |
|---|---|---|---|---|---|---|---|---|---|---|---|
| Posn. | A | C | G | T | A/T | A/C | A/G | C/T | G/T | A/G/T | A/C/G/T |
| −1 | Y75 | R70* | K70 | Q70* | | | | T46* | | | G70 |
| | L75* | H75* | E70* | C70 | | | | | | | A70 |
| | C75* | R75* | E75* | L70 | | | | | | | S70 |
| | Y139* | H46* | E46* | Y75* | | | | | | | G46* |
| | C46* | K46* | D46* | Q75* | | | | | | | |
| | A46* | R46* | | H75* | | | | | | | |
| | | | | H139 | | | | | | | |
| | | | | Q46* | | | | | | | |
| | | | | H46* | | | | | | | |
| −2 | Q70 | E70 | H70 | Q44* | C44* | | | | | | |
| | T44* | D70 | D44* | | | | | | | | |
| | A44* | K44* | E44* | | | | | | | | |
| | V44* | R44* | | | | | | | | | |
| | I44* | | | | | | | | | | |
| | L44* | | | | | | | | | | |
| | N44* | | | | | | | | | | |
| −3 | Q68 | E68 | R68 | M68 | | H68 | | Y68 | K68 | | |
| | C24* | F68 | | C68 | | | | | | | |
| | I24* | K24* | | L68 | | | | | | | |
| | | R24* | | F68 | | | | | | | |
| −4 | A26* | E77 | R77 | | | | | S77 | | | S26* |
| | Q77 | K26* | E26* | | | | | Q26* | | | |
| −5 | | E42 | R42 | | | K28* | C28* | | | | M66 |
| | | | | | | | Q42 | | | | K66 |
| −6 | Q40 | E40 | R40 | C40 | A40 | | | | | | S40 |
| | C28* | R28* | | I40 | A79 | | | | | | S28* |
| | | | | V40 | A28* | | | | | | |
| | | | | C79 | H28* | | | | | | |
| | | | | I79 | | | | | | | |
| | | | | V79 | | | | | | | |
| | | | | Q28* | | | | | | | |
| −7 | N30* | E38 | K38 | I38 | | | C38 | | | | H38 |
| | Q38 | K30* | R38 | L38 | | | | | | | N38 |
| | | R30* | E30* | | | | | | | | Q30* |
| −8 | F33 | E33 | F33 | L33 | | R32* | R33 | | | | |
| | Y33 | D33 | H33 | V33 | | | | | | | |
| | | | | I33 | | | | | | | |
| | | | | F33 | | | | | | | |
| | | | | C33 | | | | | | | |
| −9 | | E32 | R32 | L32 | | | | D32 | | | S32 |
| | | | K32 | V32 | | | | I32 | | | N32 |
| | | | | A32 | | | | | | | H32 |
| | | | | C32 | | | | | | | Q32 |
| | | | | | | | | | | | T32 |

[0576] For polynucleotides, a “variant” comprises a deletion and/or addition of one or more nucleotides at one or more sites within the native polynucleotide. One of skill in the art will recognize that variants of the nucleic acids of the embodiments will be constructed such that the open reading frame is maintained. For polynucleotides, conservative variants include those sequences that, because of the degeneracy of the genetic code, encode the amino acid sequence of one of the polypeptides of the embodiments. Variant polynucleotides include synthetically derived polynucleotides, such as those generated, for example, by using site-directed mutagenesis but which still encode a recombinant meganuclease of the embodiments. Generally, variants of a particular polynucleotide of the embodiments will have at least about 40%, about 45%, about 50%, about 55%, about 60%, about 65%, about 70%, about 75%, about 80%, about 85%, about 90%, about 91%, about 92%, about 93%, about 94%, about 95%, about 96%, about 97%, about 98%, about 99% or more sequence identity to that particular polynucleotide as determined by sequence alignment programs and parameters described elsewhere herein. Variants of a particular polynucleotide of the embodiments (i.e., the reference polynucleotide) can also be evaluated by comparison of the percent sequence identity between the polypeptide encoded by a variant polynucleotide and the polypeptide encoded by the reference polynucleotide.

[0577] The deletions, insertions, and substitutions of the protein sequences encompassed herein are not expected to produce radical changes in the characteristics of the polypeptide. However, when it is difficult to predict the exact effect of the substitution, deletion, or insertion in advance of doing so, one skilled in the art will appreciate that the effect will be evaluated by screening the polypeptide for its ability to preferentially recognize and cleave recognition sequences found within the human beta-2 microglobulin gene (SEQ ID NO: 1).

### EXAMPLES

[0578] This disclosure is further illustrated by the following examples, which should not be construed as limiting. Those skilled in the art will recognize, or be able to ascertain, using no more than routine experimentation, numerous equivalents to the specific substances and procedures described herein. Such equivalents are intended to be encompassed in the scope of the claims that follow the examples below.

### Example 1

### Characterization of Meganucleases that Recognize and Cleave B2M Recognition Sequences

[0579] 1. Meganucleases that Recognize and Cleave the B2M 13-14 Recognition Sequence

[0580] Recombinant meganucleases (SEQ ID NOs: 12-100), collectively referred to herein as “B2M 13-14 meganucleases,” were engineered to recognize and cleave the B2M 13-14 recognition sequence (SEQ ID NO:2), which is present in the human beta-2 microglobulin gene (SEQ ID NO: 1). Each B2M 13-14 recombinant meganuclease comprises an N-terminal nuclease-localization signal derived from SV40, a first meganuclease subunit, a linker sequence, and a second meganuclease subunit. A first subunit in each B2M 13-14 meganuclease binds to the B2M13 recognition half-site of SEQ ID NO:2, while a second subunit binds to the

### B2M14 Recognition Half-Site (See FIG. 1).

[0581] B2M13-binding subunits and B2M14-binding subunits each comprise a 56 base pair hypervariable region, referred to as HVR1 and HVR2, respectively. B2M13-binding subunits are highly conserved or, in many cases, identical outside of the HVR1 region except at position 80 or position 271 (comprising a Q or E residue), and are highly conserved within the HVR1 region. Similarly, B2M14-binding subunits are also highly conserved or, in many cases, identical outside of the HVR2 region except at position 80 or position 271 (comprising a Q or E residue). Like the HVR1 region, the HVR2 region is also highly conserved.

[0582] The B2M13-binding regions of SEQ ID NOs: 12-100 are provided as SEQ ID NOs: 132-220, respectively. Each of SEQ ID NOs: 132-220 share at least 90% sequence identity to SEQ ID NO: 132, which is the B2M13-binding region of the meganuclease B2M 13-14×.479 (SEQ ID NO:12). B2M14-binding regions of SEQ ID NOs: 12-100 are provided as SEQ ID NOs:221-309, respectively. Each of SEQ ID NOs:221-309 share at least 90% sequence identity to SEQ ID NO:221, which is the B2M14-binding region of the meganuclease B2M 13-14×.479 (SEQ ID NO: 12).

2. Meganucleases that Recognize and Cleave the B2M 5-6 Recognition Sequence

[0583] Recombinant meganucleases (SEQ ID NOs: 101-113), collectively referred to herein as “B2M 5-6 meganucleases,” were engineered to recognize and cleave the B2M 5-6 recognition sequence (SEQ ID NO:4), which is present in the human beta-2 microglobulin gene (SEQ ID NO: 1). Each B2M 5-6 recombinant meganuclease comprises an N-terminal nuclease-localization signal derived from SV40, a first meganuclease subunit, a linker sequence, and a second meganuclease subunit. A first subunit in each B2M 5-6 meganuclease binds to the B2M5 recognition half-site of SEQ ID NO:4, while a second subunit binds to the B2M6 recognition half-site (see FIG. 1).

[0584] B2M5-binding subunits and B2M6-binding subunits each comprise a 56 base pair hypervariable region, referred to as HVR1 and HVR2, respectively. B2M5-binding subunits are highly conserved or, in many cases, identical outside of the HVR1 region except at position 80 or position 271 (comprising a Q or E residue), and are highly conserved within the HVR1 region. Similarly, B2M5-binding subunits are also highly conserved or, in many cases, identical outside of the HVR2 region except at position 80 or position 271 (comprising a Q or E residue), and are highly conserved within the HVR2 region.

[0585] The B2M5-binding regions of SEQ ID NOs: 101-113 are provided as SEQ ID NOs:310-322, respectively. Each of SEQ ID NOs:310-322 share at least 90% sequence identity to SEQ ID NO:310, which is the B2M5-binding region of the meganuclease B2M 5-6×.14 (SEQ ID NO: 101). B2M6-binding regions of SEQ ID NOs: 101-113 are provided as SEQ ID NOs:323-335, respectively. Each of SEQ ID NOs:323-335 share at least 90% sequence identity to SEQ ID NO:323, which is the B2M6-binding region of the meganuclease B2M 5-6×.14 (SEQ ID NO: 101).

3. Meganucleases that Recognize and Cleave the B2M 7-8 Recognition Sequence

[0586] Recombinant meganucleases (SEQ ID NOs: 114-124), collectively referred to herein as “B2M 7-8 meganucleases,” were engineered to recognize and cleave the B2M 7-8 recognition sequence (SEQ ID NO:6), which is present in the human beta-2 microglobulin gene (SEQ ID NO: 1). Each B2M 7-8 recombinant meganuclease comprises an N-terminal nuclease-localization signal derived from SV40, a first meganuclease subunit, a linker sequence, and a second meganuclease subunit. A first subunit in each B2M 7-8 meganuclease binds to the B2M7 recognition half-site of SEQ ID NO:6, while a second subunit binds to the B2M8 recognition half-site (see FIG. 1).

[0587] B2M7-binding subunits and B2M8-binding subunits each comprise a 56 base pair hypervariable region, referred to as HVR1 and HVR2, respectively. B2M7-binding subunits are highly conserved or, in many cases, identical outside of the HVR1 region except at position 80 or position 271 (comprising a Q or E residue), and are highly conserved within the HVR1 region. Similarly, B2M8-binding subunits are also highly conserved or, in many cases, identical outside of the HVR2 region except at position 80 or position 271 (comprising a Q or E residue), and are highly conserved within the HVR2 region.

[0588] The B2M7-binding regions of SEQ ID NOs: 114-124 are provided as SEQ ID NOs:336-346, respectively. Each of SEQ ID NOs:336-346 share at least 90% sequence identity to SEQ ID NO:336, which is the B2M7-binding region of the meganuclease B2M 7-8×.88 (SEQ ID NO: 114). B2M8-binding regions of SEQ ID NOs: 114-124 are provided as SEQ ID NOs:347-357, respectively. Each of SEQ ID NOs:347-357 share at least 90% sequence identity to SEQ ID NO:347, which is the B2M8-binding region of the meganuclease B2M 7-8×.88 (SEQ ID NO: 114).

4. Meganucleases that Recognize and Cleave the B2M 11-12 Recognition Sequence

[0589] Recombinant meganucleases (SEQ ID NOs: 125 and 126), collectively referred to herein as “B2M 11-12 meganucleases,” were engineered to recognize and cleave the B2M 11-12 recognition sequence (SEQ ID NO:8), which is present in the human beta-2 microglobulin gene (SEQ ID NO: 1). Each B2M 11-12 recombinant meganuclease comprises an N-terminal nuclease-localization signal derived from SV40, a first meganuclease subunit, a linker sequence, and a second meganuclease subunit. A first subunit in each B2M 11-12 meganuclease binds to the B2M11 recognition half-site of SEQ ID NO:8, while a second subunit binds to the B2M12 recognition half-site (see FIG. 1).

[0590] B2M11-binding subunits and B2M12-binding subunits each comprise a 56 base pair hypervariable region, referred to as HVR1 and HVR2, respectively. B2M11-binding subunits are highly conserved or, in many cases, identical outside of the HVR1 region except at position 80 or position 271 (comprising a Q or E residue), and are highly conserved within the HVR1 region. Similarly, B2M12-binding subunits are also highly conserved or, in many cases, identical outside of the HVR2 region except at position 80 or position 271 (comprising a Q or E residue), and are highly conserved within the HVR2 region.

[0591] The B2M11-binding regions of SEQ ID NOs: 125 and 126 are provided as SEQ ID NOs:358 and 359, respectively. SEQ ID NOs:358 and 359 share 99% sequence identity. B2M12-binding regions of SEQ ID NOs: 125 and 126 are provided as SEQ ID NOs:360 and 361, respectively. SEQ ID NOs:360 and 361 share 99% sequence identity.

### 5. Cleavage of B2M Recognition Sequences in a CHO Cell Reporter Assay

[0592] To determine whether B2M 13-14, B2M 5-6, B2M 7-8, and B2M 11-12 meganucleases could recognize and cleave their respective recognition sequences (SEQ ID NOs:2, 4, 6, and 8, respectively), each recombinant meganuclease was evaluated using the CHO cell reporter assay previously described (see WO/2012/167192 and FIGS. 8A-8D). To perform the assays, CHO cell reporter lines were produced which carried a non-functional Green Fluorescent Protein (GFP) gene expression cassette integrated into the genome of the cells. The GFP gene in each cell line was interrupted by a pair of recognition sequences such that intracellular cleavage of either recognition sequence by a meganuclease would stimulate a homologous recombination event resulting in a functional GFP gene.

[0593] In CHO reporter cell lines developed for this study, one recognition sequence inserted into the GFP gene was the B2M 13-14 recognition sequence (SEQ ID NO:2), the B2M 5-6 recognition sequence (SEQ ID NO:4), the B2M 7-8 recognition sequence (SEQ ID NO:6), or the B2M 11-12 recognition sequence (SEQ ID NO:8). The second recognition sequence inserted into the GFP gene was a CHO-23/24 recognition sequence, which is recognized and cleaved by a control meganuclease called “CHO-23/24”. CHO reporter cells comprising the B2M 13-14 recognition sequence and the CHO-23/24 recognition sequence are referred to herein as “B2M 13-14 cells.” CHO reporter cells comprising the B2M 5-6 recognition sequence and the CHO-23/24 recognition sequence are referred to herein as “B2M 5-6 cells.” CHO reporter cells comprising the B2M 7-8 recognition sequence and the CHO-23/24 recognition sequence are referred to herein as “B2M 7-8 cells.” CHO reporter cells comprising the B2M 11-12 recognition sequence and the CHO-23/24 recognition sequence are referred to herein as “B2M 11-12 cells.”

[0594] CHO reporter cells were transfected with plasmid DNA encoding their corresponding recombinant meganucleases (e.g., B2M 13-14 cells were transfected with plasmid DNA encoding B2M 13-14 meganucleases) or encoding the CHO-23/34 meganuclease. In each assay, 4e⁵ CHO reporter cells were transfected with 50 ng of plasmid DNA in a 96-well plate using Lipofectamine 2000 (ThermoFisher) according to the manufacturer's instructions. At 48 hours post-transfection, cells were evaluated by flow cytometry to determine the percentage of GFP-positive cells compared to an untransfected negative control (e.g., B2M 13-14bs). As shown in FIGS. 4A-4J, all B2M 13-14, B2M 5-6, B2M 7-8, and B2M 11-12 meganucleases tested were found to produce GFP-positive cells in cell lines comprising their corresponding recognition sequence at frequencies significantly exceeding the negative control.

[0595] These studies demonstrated that B2M 13-14 meganucleases, B2M 5-6 meganucleases, B2M 11-12 meganucleases, and B2M 13-14 meganucleases encompassed by the disclosure can efficiently target and cleave their respective recognition sequences in cells.

### Example 2

### Suppression of Cell-Surface B2M Expression in T Cells

### 1. Suppression of B2M Cell-Surface Expression in Human T Cells

[0596] This study demonstrated that a select number of B2M 13-14 meganucleases encompassed by the disclosure could cleave the B2M 13-14 recognition sequence in human T cells obtained from a donor, resulting in suppression of B2M cell-surface expression. To test whether B2M meganucleases could cleave the B2M 13-14 recognitions sequence in human T cells, donor cells were stimulated with anti-CD3 and anti-CD28 antibodies for 3 days, then electroporated with mRNA encoding a given B2M 13-14 meganuclease (1 μg) using the Amaxa 4D-Nucleofector (Lonza) according to the manufacturer's instructions. As a positive control, cells were mock electroporated. In an additional control for electroporation efficiency, cells were electroporated with mRNA encoding GFP (1 μg). At 3 days post-electroporation, cells were stained with an antibody recognizing β-2 microglobulin (BD Biosciences) and analyzed by flow cytometry. Flow plots are shown in FIGS. 5A-5N and the data are summarized in Table 6.

[0597] Positive control cells and GFP-electroporated cells stained overwhelmingly positive for B2M expression with 0.18% and 0.23% of the cells staining negative, respectively (FIGS. 5A and 5C, and Table 6). Unstained control cells were 99.99% negative for B2M staining (FIG. 5B and Table 6). Surprisingly, although all of the B2M 13-14 meganucleases tested were successful in the CHO reporter assay, B2M 13-14×.93 was the only meganuclease that showed any indication that it could generate indels in the B2M gene and reduce B2M cell-surface expression, with 2.18% of cells staining negative for B2M (FIG. 5N and Table 6). Cells electroporated with any of the other B2M 13-14 meganucleases tested showed B2M-negative cells roughly equivalent to the mock-electroporated control, ranging from 0.01%-0.14% negative (FIGS. 5A-5M and Table 6). These results indicated that, for the B2M gene, successful cleavage of a B2M recognition sequence in reporter cells does not assure cleavage of the recognition sequence in T cells and, subsequently, reduced cell-surface expression of B2M.

TABLE 6

| Meganuclease | % B2M Negative | % B2M Positive |
|---|---|---|
| Positive Control | 0.18% | 99.82% |
| Unstained Control | 99.99% | 0.01% |
| GFP | 0.23% | 99.77% |
| B2M 13-14x.10 | 0.10% | 99.90% |
| B2M 13-14x.32 | 0.03% | 99.97% |
| B2M 13-14x.82 | 0.06% | 99.94% |
| B2M 13-14x.84 | 0.01% | 99.99% |
| B2M 13-14x.85 | 0.06% | 99.94% |
| B2M 13-14x.3 | 0.00% | 100.00% |
| B2M 13-14x.14 | 0.04% | 99.96% |
| B2M 13-14x.22 | 0.06% | 99.94% |
| B2M 13-14x.31 | 0.01% | 99.99% |
| B2M 13-14x.76 | 0.14% | 99.86% |
| B2M 13-14x.93 | 2.18% | 97.82% |

[0598] Since B2M 13-14×.93 was the only one of the B2M 13-14 meganucleases that demonstrated activity against the B2M recognition sequence in human T cells, this meganuclease was further modified to increase nuclease activity. The inventors have previously shown that mutations at amino acid position 80 and 66 of an I-CreI-derived meganuclease subunit (which also corresponds to positions 271 and 257, respectively, of a single-chain meganuclease) can dramatically impact nuclease activity, presumably due to non-specific interactions with the negatively-charged DNA backbone. Common substitutions include E or Q at amino acid position 80, and Y, K, or R at amino acid position 66. Amino acid position 80 can be changed in either the first meganuclease subunit and/or the second meganuclease subunit, generating the following possible combinations: E in both meganuclease subunits, Q in both meganuclease subunits, E in the first meganuclease subunit and Q in the second meganuclease subunit, or Q in the first meganuclease subunit and E in the second meganuclease subunit. Amino acid position 66 can be modified in either meganuclease subunit, but in this case is only modified in the first meganuclease subunit. The original B2M 13-14×.93 meganuclease had a Q at amino acid position 80 in both meganuclease subunits.

[0599] Table 7 shows B2M 13-14×.93 variants generated, with either E or Q indicating the amino acid at position 80 in the first and second meganuclease subunit, respectively followed by the amino acid substitution made at position 66 in the first meganuclease subunit. For example, B2M 13-14×.93 EQY66 indicates that amino acid 80 in the first meganuclease subunit is E, amino acid 80 (i.e., 271) in the second meganuclease subunit is Q, and amino acid 66 in the first meganuclease subunit is Y.

[0600] To test these variants of B2M 13-14×.93, donor human T cells were stimulated with anti-CD3 and anti-CD28 antibodies for 3 days, then electroporated with mRNA encoding a given B2M 13-14 meganuclease (1 μg) using the Amaxa 4D-Nucleofector (Lonza) according to the manufacturer's instructions. At 3 days post-electroporation, cells were stained with an antibody recognizing β-2 microglobulin (BD Biosciences) and analyzed by flow cytometry. Flow cytometry results are summarized in Table 7. All B2M 13-14×.93 variants were able to disrupt the B2M gene, with knockout efficiencies ranging from 1.58% to 37% (Table 7). The most active B2M 13-14×.93 variant was B2M 13-14×.93 QE, which resulted in 37% B2M-negative cells (Table 7). The next two most active B2M 13-14×.93 meganuclease variants both had a Q at position 80 in the second meganuclease subunit and a Y at position 66 (B2M 13-14×.93 QQY66 and B2M 13-14×.93 EQY66). Interestingly, most of the variants were not markedly different from the original B2M 13-14×.93 meganuclease (B2M 13-14×.93EQ, QQK66, QQR66, EEY66, EEK66, EER66, EQK66, and EQR66).

TABLE 7

| | % | % |
|---|---|---|
| Meganuclease | B2M Negative | B2M Positive |
| B2M 13-14x.93EE | 18.3 | 81.7 |
| B2M 13-14x.93QE | 37 | 63 |
| B2M 13-14x.93EQ | 5.13 | 94.87 |
| B2M 13-14x.93QQY66 | 19.2 | 80.8 |
| B2M 13-14x.93QQK66 | 2.64 | 97.36 |
| B2M 13-14x.93QQR66 | 5.05 | 94.95 |
| B2M 13-14x.93EEY66 | 1.58 | 98.42 |
| B2M 13-14x.93EEK66 | 3.84 | 96.16 |
| B2M 13-14x.93EER66 | 7.07 | 92.93 |
| B2M 13-14x.93EQY66 | 21.4 | 78.6 |
| B2M 13-14x.93EQK66 | 6.81 | 93.19 |
| B2M 13-14x.93EQR66 | 5.12 | 94.88 |
| B2M 13-14x.93 | 3.95 | 96.05 |

[0601] While these substitutions at amino acid positions 80 and 66 resulted in B2M 13-14×.93 meganucleases that were more active against the B2M 13-14 recognition sequence than the original B2M 13-14×.93 meganuclease, further optimization was carried out to maximize the activity of the B2M 13-14 meganucleases. New B2M 13-14 meganucleases were engineered in which the first meganuclease subunit remained the same as in B2M 13-14×.93, but the second meganuclease subunit contained new amino acid substitutions at positions contacting the B2M 13-14 recognition sequence.

[0602] To test these new B2M 13-14 variants, donor human T cells were stimulated with anti-CD3 and anti-CD28 antibodies for 3 days, then electroporated with mRNA encoding a given B2M 13-14 meganuclease (1 μg) using the Amaxa 4D-Nucleofector (Lonza) according to the manufacturer's instructions. B2M 13-14×.93 QE was included to allow for comparison to previous variants. At 6 days post-electroporation, cells were stained with an antibody recognizing β-2 microglobulin (BD Biosciences) as well as an antibody recognizing CD3 (BioLegend), a marker of T cells. Flow cytometry plots are shown in FIGS. 6A-6J.

[0603] In this experiment, B2M 13-14×.93QE generated 21.2% B2M-negative cells, compared to 0.49% in the non-electroporated control cells (FIGS. 6B and 6A, respectively). Several of the new variants, including B2M 13-14×.97, B2M 13-14×.199, B2M 13-14×.202, B2M 13-14×.169, and B2M 13-14×.275 were significantly more active than B2M 13-14×.93 QE, generating B2M knockout efficiencies as high as 58.4% (FIG. 6J).

[0604] A final group of B2M 13-14 meganucleases was generated and evaluated for their ability to eliminate cell-surface expression of B2M on human T cells. These nucleases were based on B2M 13-14×.169, one of the variants described above. Changes were made in the first meganuclease subunit to introduce alternative base contacts, while the second meganuclease subunit remained the same as in B2M 13-14×.169.

[0605] Donor human T cells were stimulated with anti-CD3 and anti-CD28 antibodies for 3 days, then electroporated with mRNA encoding a given B2M 13-14 meganuclease (1 μg) using the Amaxa 4D-Nucleofector (Lonza) according to the manufacturer's instructions. B2M 13-14×.202 was included to allow for comparison to previous variants shown in FIGS. 6A-6J. To look for the loss of B2M surface expression, cells were stained with an antibody recognizing β-2 microglobulin (BD Biosciences) as well as an antibody recognizing CD3 (BioLegend), a marker of T cells. Flow cytometry data for the entire panel of variants at day 3 post-electroporation are summarized in Table 8, and flow plots of the B2M 13-14 meganucleases that showed B2M knockout efficiency of >40% are shown in FIGS. 7A-7H.

[0606] Similar to the previous experiment, B2M 13-14×.202 showed a B2M knockout efficiency of 60.9% (Table 8). Several of the B2M 13-14 variants tested showed knockout efficiencies greater than 40% (FIGS. 7A-7H) and two variants, B2M 13-14×.287 and B2M 13-14×.479, surpassed the efficiency of B2M 13-14×.202 with negative staining populations of 75.7% and 67.2%, respectively.

TABLE 8

| Meganuclease | % B2M Negative | % B2M Positive |
|---|---|---|
| B2M 13-14x.281 | 53.6 | 46.4 |
| B2M 13-14x.283 | 49.3 | 50.7 |
| B2M 13-14x.285 | 22 | 78 |
| B2M 13-14x.286 | 44.6 | 55.4 |
| B2M 13-14x.287 | 75.7 | 24.3 |
| B2M 13-14x.288 | 18.8 | 81.2 |
| B2M 13-14x.317 | 3.91 | 96.09 |
| B2M 13-14x.325 | 14.4 | 85.6 |
| B2M 13-14x.338 | 4.68 | 95.32 |
| B2M 13-14x.362 | 37.8 | 62.2 |
| B2M 13-14x.365 | 27.4 | 72.6 |
| B2M 13-14x.371 | 22.6 | 77.4 |
| B2M 13-14x.377 | 75.9 | 24.1 |
| B2M 13-14x.378 | 3.54 | 96.46 |
| B2M 13-14x.381 | 44.1 | 55.9 |
| B2M 13-14x.448 | 17.1 | 82.9 |
| B2M 13-14x.456 | 15.7 | 84.3 |
| B2M 13-14x.457 | 19.7 | 80.3 |
| B2M 13-14x.464 | 8.24 | 91.76 |
| B2M 13-14x.465 | 30.8 | 69.2 |
| B2M 13-14x.479 | 67.2 | 32.8 |
| B2M 13-14x.556 | 11.8 | 88.2 |
| B2M 13-14x.551 | 40.3 | 59.7 |
| B2M 13-14x.202 | 60.9 | 39.1 |

[0607] The data presented above demonstrate the successful engineering of meganucleases designed to target a double strand break at the beta-2 microglobulin gene and the use of such meganucleases to generate mutations in the beta-2 microglobulin gene in human T cells, resulting in knockout of the gene. Surprisingly, only one of eleven B2M 13-14 meganucleases that were successful in the CHO reporter assay was actually able to eliminate expression of the B2M gene. Further, the only one of the initial B2M 13-14 meganuclease that caused a deletion in the B2M gene, B2M 13-14×.93, did so with very low frequency (2.18%, Table 6). B2M 13-14×.93 was taken through several rounds of redesign in order to optimize its activity and specificity, eventually resulting in several B2M 13-14 meganucleases that were capable of generating B2M knockouts with efficiencies in the 60-75% range (Table 8).

### Example 3

### Double Knockout of Cell-Surface B2M and T Cell Receptor in T Cells

### 1. Double Knockout By Simultaneous Nucleofection

[0608] In some cases, it may be desirable to knockout both the beta-2 microglobulin gene and a native T cell receptor (TCR). The inventors have previously described meganucleases designed to cause a double strand break in the T cell receptor alpha constant gene (SEQ ID NO: 127) which, in turn, disrupts cell-surface expression of the endogenous TCR. One such meganuclease is referred to as TRC 1-2×.87 EE (SEQ ID NO: 131), which targets the recognition sequence set forth in SEQ ID NO: 128. Loss of the TCR can be observed by staining cells with an antibody against the CD3 protein, which is only expressed on the surface of cells if the TCR is expressed.

[0609] To test whether TRC 1-2×.87 EE and B2M 13-14 meganucleases could be used to generate a population of cells in which both the TRC gene and the B2M gene were knocked out, experiments were performed in which separate mRNAs encoding these meganucleases were delivered simultaneously to human T cells. In a first study, donor human T cells were stimulated with anti-CD3 and anti-CD28 antibodies for 2 days, then co-electroporated with mRNA encoding B2M 13-14×.202 (1 μg) and mRNA encoding TRC 1-2×.87 EE (1 μg) using the Amaxa 4D-Nucleofector (Lonza) according to the manufacturer's instructions. As controls, human T cells were mock electroporated or electroporated with mRNA encoding a single meganuclease, either B2M 13-14×.202 or TRC 1-2×.87 EE. At 6 days post-electroporation, cells were stained with an antibody against CD3 and an antibody against B2M and analyzed by flow cytometry (FIGS. 8A-8D). Cells that were electroporated with TRC 1-2×.87 EE alone were 57.6% TCR negative (FIG. 8B), compared to 2.35% in the mock electroporated cells (FIG. 8A), and cells that were electroporated with B2M 13-14×.202 alone were 49.4% B2M negative (FIG. 8C) compared to 0.72% in mock electroporated cells (FIG. 8A). Cells that were co-electroporated with mRNA encoding B2M 13-14×.202 and mRNA encoding TRC 1-2×.87 EE show a clear population in which 21.5% of the cells were both negative for B2M and TCR expression (FIG. 8D), compared to 0.66% in mock electroporated cells (FIG. 8A). In cells that were co-electroporated with mRNA for both meganucleases, the single knockout efficiencies for TCR and B2M were 28.3% and 16.7%, respectively.

[0610] In a second study, donor human T cells were stimulated with anti-CD3 and anti-CD28 antibodies for 2 days, then co-electroporated with mRNA encoding B2M 13-14×.169 (1 μg) and mRNA encoding TRC 1-2×.87 EE (1 μg) using the Amaxa 4D-Nucleofector (Lonza) according to the manufacturer's instructions. As controls, human T cells were mock electroporated or electroporated with mRNA encoding a single meganuclease, either B2M 13-14×.169 or TRC 1-2×.87 EE. At 6 days post-electroporation, cells were stained with an antibody against CD3 and an antibody against B2M and analyzed by flow cytometry (FIGS. 9A-9D). Cells that were electroporated with TRC 1-2×.87 EE alone were 57.6% TCR negative (FIG. 9B), compared to 2.35% in the mock electroporated cells (FIG. 9A), and cells that were electroporated with B2M 13-14×.169 alone were 28.1% B2M negative (FIG. 9C) compared to 0.72% in mock electroporated cells (FIG. 9A). Cells that were co-electroporated with mRNA encoding B2M 13-14×.169 and mRNA encoding TRC 1-2×.87 EE show a clear population in which 15.4% of the cells were both negative for B2M and TCR expression (FIG. 9D), compared to 0.66% in mock electroporated cells (FIG. 9A). In cells that were co-electroporated with mRNA for both meganucleases, the single knockout efficiencies for TCR and B2M were 33.7% and 13.0%, respectively.

### 2. Double Knockout by Sequential Nucleofection

[0611] While simultaneous electroporation of human T cells with mRNA encoding a B2M 13-14 meganuclease and mRNA encoding the TRC 1-2×.87EE meganuclease is effective in generating a B2M/TCR double-negative population, it may be useful to generate a double-knockout population using sequential electroporation of meganuclease mRNA.

[0612] To test this, donor human T cells were stimulated with anti-CD3 and anti-CD28 antibodies for 3 days, then electroporated with mRNA encoding B2M 13-14×.93 QE (1 μg) using the Amaxa 4D-Nucleofector (Lonza) according to the manufacturer's instructions. 4 days post-electroporation, B2M-negative cells were enriched using a biotinylated anti-B2M antibody (BioLegend) and a human biotin selection cocktail kit (StemCell technologies), resulting in a population of cells that were 88.15% B2M negative (FIG. 10B) as shown by flow cytometry analysis after staining with an antibody against B2M. The B2M-negative enriched cells were re-stimulated with anti-CD3 and anti-CD28 antibodies for 3 days, then electroporated with mRNA encoding TRC 1-2×.87 EE (1 μg) using the Amaxa 4D-Nucleofector (Lonza) according to the manufacturer's instructions. At 5 days post-electroporation, cells were stained with antibodies against B2M and TCR and analyzed by flow cytometry (FIG. 10C). 31.67% of these cells were negative for surface expression of both B2M and TCR, compared to 0.58% of the starting population (FIG. 10A), indicating that sequential electroporation of cells with mRNA encoding B2M 13-14 and TRC 1-2 meganucleases is also an effective method to generate a B2M/TCR double-negative population of human T cells.

[0613] It was then determined whether a highly purified population of B2M/TCR double-negative cells could be enriched. In this study, donor human peripheral blood mononuclear cells (PMBCs) were stimulated with anti-CD3 and anti-CD28 antibodies for 2 days, then electroporated with mRNA encoding B2M 13-14×.93 QE (1 μg) using the Amaxa 4D-Nucleofector (Lonza) according to the manufacturer's instructions. B2M-negative cells were enriched as described above. Cells were then re-stimulated with anti-CD3 and anti-CD28 antibodies for 3 days and electroporated with mRNA encoding TRC 1-2×.87 EE. 6 days post-electroporation, CD3-negative cells were enriched using a CD3 positive selection kit (StemCell Technologies) followed by another enrichment for B2M-negative cells using a biotinylated anti-B2M antibody and a biotin selection kit (StemCell Technologies). Enriched cells were incubated 3 days in the presence of L-2, L-7 and IL-15, then stained with antibodies against B2M and CD3 and analyzed by flow cytometry (FIGS. 11A-11C). FIGS. 11A and 11B show the starting PBMCs stained either with anti-CD3 alone (FIG. 11A) or anti-CD3 and anti-B2M (FIG. 11B). Sequential electroporation with mRNA encoding B2M 13-14, then mRNA encoding TRC 1-2×.87 EE followed by enrichment for both CD3- and B2M-negative cells resulted in a population that was 98.5% B2M/TCR double-negative (FIG. 11C).

### 3. Production of an Enriched and Expanded Population of B2M/TCR Double Knockout T Cells

[0614] Co-electroporation of mRNA encoding a B2M 13-14 meganuclease and mRNA encoding TRC 1-2×.87EE may allow for the production and generation of a therapeutically relevant amount (i.e., >10 million cells) of B2M/TCR double-negative human T cells. To generate >10 million B2M/TCR double-negative cells, human T cells will be stimulated with anti-CD3 and anti-CD28 antibodies for 3 days, then electroporated with mRNA encoding B2M 13-14×.479 and mRNA encoding TRC 1-2×.87EE using the Amaxa 4D-Nucleofector (Lonza). In typical experiments, 1 million cells are electroporated for each sample. To produce a therapeutically relevant amount of B2M/TCR double-negative cells, as many as 10 million cells will be electroporated. Following electroporation, cells will be incubated with media including IL-2 (30 ng/mL) and IL-7 (10 ng/mL) for 7 days. B2M/TCR double-negative cells will be enriched using a CD3 positive selection kit (StemCell Technologies) followed by enrichment for B2M-negative cells using a biotinylated anti-B2M antibody and a biotin selection kit (StemCell Technologies). Purity will be assessed by flow cytometry using antibodies against B2M and CD3. B2M/TCR double-negative cells will be incubated and expanded with media including IL-2 (30 ng/mL) and IL-7 (10 ng/mL) for an additional 7 days.

### Example 4

### Reduced Allogenicity of B2M Knockout T Cells

### 1. Evaluation of B2M Knockout T Cells in Cytotoxicity Assay

[0615] The purpose of this study was to demonstrate whether B2M knockout T cells exhibit reduced allogenicity when compared to B2M-positive T cells.

[0616] Here, frozen PBMC vials from two mismatched donors were obtained from ImmunoSpot (C.T.L.-Catalog # CTL-CP1 lot 20060906 (Donor 36) and 20110525 (Donor 75)). Their HLA class I typing appears in Table 9.

TABLE 9

| | | | Donor 75 | | |
|---|---|---|---|---|---|
| Donor 36 | | | | | Allele |
| Gene | Allele 1 | Allele 2 | Gene | Allele 1 | 2 |
| HLA A | 2 | 68 | HLA A | 33 | 68 |
| HLA B | 7 | 44 | HLA B | 14 | 48 |
| HLA C | w7 | w7 | HLA C | w8 | w8 |

[0617] The strategy was to prime T cells from each donor against allo-antigens using mismatched dendritic cells (DCs) (raised from the other donor). These allo-sensitized T cells served as effectors in cytotoxicity assays. Briefly, DCs were generated by thawing frozen PBMCs and culturing in X-VIVO 15 (Lonza) with 2% HABS. Cells were cultured in a T75 flask and incubated for 1 hour to allow monocyte precursors to adhere. Non-adherent cells were removed and cultured separately in 10 ng/mL IL-2. Adherent cells were cultured with 20 mL of X-VIVO+2% HABS supplemented with 800 U/mL recombinant human (rh)GM-CSF and 500 U/mL rhIL-4. Adherent DCs were harvested using enzyme-free dissociation buffer (Life Technologies). Harvested DCs were then co-cultured for 5 days with magnetically enriched CD8⁺ T cells at a 5:1 T cell:DC ratio.

[0618] In separate cultures T cells from each donor were edited with the B2M 13-14×.479 meganuclease. B2M-negative and B2M-positive T cells served as the targets in cytotoxicity assays. Briefly, donor human T cells were stimulated with ImmunoCult, a reagent purchased from Stem Cell Technologies consisting of multimers of anti-CD3, anti-CD28, and anti-CD2 antibodies. Stimulation was carried out for 3 days, prior to electroporation with 1 μg of B2M13-14×479 mRNA using the Amaxa 4D-Nucleofector (Lonza) according to the manufacturer's instructions. As controls, human T cells were electroporated in the absence of mRNAs. At 6 days post-electroporation, cells that were electroporated with B2M 13-14×.479 mRNAs were enriched for B2M-negative cells with a biotinylated antibody against B2M and an anti-biotin magnetic separation kit (Stem Cell Technologies). B2M-negative and control B2M-positive cells were labeled with 2 μM CellTrace Violet (Life Technologies) in accord with manufacturer's instructions.

[0619] To measure cytotoxicity, allo-sensitized T cells from Donor 36 were cultured with B2M-positive or B2M-negative CellTrace Violet-labeled T cells from either Donor 36 (syngeneic controls) or Donor 75 (allogeneic samples). Co-cultures were also carried out using allo-sensitized T cells from Donor 75 and B2M-positive or B2M-negative CellTrace Violet-labeled T cells from either Donor 75 (syngeneic controls) or Donor 36 (allogeneic samples). Co-cultures were carried out for 7 hours at a 5:1 effector:target ratio. After 7 hours of incubation, cells were labeled with VAD-FMK-FITC (CaspACE-Promega) at the vendor's recommended concentration as well as a fluorescent antibody against B2M. Replicate plates were cultured for 18 hours and supernatants were collected for analyses of secreted substances, such as IFNγ (by ELISA, using a kit from BioLegend) and lactate dehydrogenase (LDH) (using a kit from Thermo-Fisher).

[0620] Targets were identified based on their CellTrace Violet signal, and the frequency with which they were killed by CD8⁺ T cells was assessed by their VAD-FMK-FITC signal. The results of the CTL assay are presented in FIGS. 12A-12H. Allo-sensitized T cells do not induce significant VAD-FMK-FITC signal in syngeneic targets, although allogeneic targets are 24-27% VAD-FMK-FITC⁺, which is indicative that effector-generated perforin A and granzyme B are inducing apoptosis in mismatched targets. VAD-FMK-FITC signal is only detected in allogeneic cultures in which the target cells are B2M-sufficient. B2M knockout target cells are not killed by alloantigen-sensitized T cells.

[0621] This observation is supported by analyses of secreted substances in 18 hour culture supernatants. Allogeneic T cell secretion of IFNγ is reduced 66-75% in co-cultures containing B2M-negative targets compared to cultures containing B2M-positive targets (FIG. 13). LDH release by killed target cells is likewise reduced when the target cells lack B2M expression (FIG. 14).

[0622] Therefore, it was observed that B2M knockout cells exhibit a reduced susceptibility to killing by alloantigen-primed cytotoxic lymphocytes.

### Example 5

### Expression of a Chimeric Antigen Receptor in TCR and B2M Double Knockout T Cells

### 1. Recombinant AAV Vectors

[0623] In this study, recombinant AAV vectors will be designed to introduce an exogenous nucleic acid sequence, encoding a chimeric antigen receptor, into the genome of human T cells at the TRC 1-2 recognition sequence (SEQ ID NO: 128) via homologous recombination. Each recombinant AAV vector will be prepared using the triple-transfection protocol described previously. Recombinant AAV vectors prepared for this study may be self-complementary or single-stranded AAV vectors. In either case, the recombinant AAV vector will generally comprise sequences for a 5′ ITR, a 5′ homology arm, a nucleic acid sequence encoding a chimeric antigen receptor, an SV40 poly(A) signal sequence, a 3′ homology arm, and a 3′ ITR. These studies will further include the use of an AAV vector encoding GFP (GFP-AAV), which will be incorporated as a positive control for AAV transduction efficiency.

2. Simultaneous Introduction of a Chimeric Antigen Receptor Sequence into the TRC 1-2 Recognition Sequence and Knockout of B2M.

[0624] Studies will be conducted to determine the efficiency of knocking out B2M while simultaneously using recombinant AAV vectors in conjunction with TRC 1-2×.87EE to insert a chimeric antigen receptor sequence into the TCR alpha constant region gene. Insertion of the CAR into the TCR alpha constant region will eliminate expression of the endogenous TCR, so cells in which B2M is also knocked out by the B2M 13-14 meganuclease will be CAR-positive, B2M/TCR double-negative.

[0625] In general, human T cells will be co-electroporated with mRNA encoding a B2M 13-14 meganuclease and mRNA encoding 1-2×.87 EE, then immediately transduced with an AAV vector encoding a CAR flanked by homology to the TRC 1-2 recognition site locus. The B2M 13-14 meganuclease will cause deletions in the B2M gene, resulting in knockout of B2M at the cell surface, while the TRC 1-2 meganuclease will cause a double strand break at the TRC 1-2 recognition site, stimulating recombination with the AAV vector through homologous recombination.

[0626] In these studies, human CD3+ T cells will be obtained and stimulated with anti-CD3 and anti-CD28 antibodies for 3 days, then co-electroporated with mRNA encoding the TRC 1-2×.87 EE meganuclease and mRNA encoding a B2M 13-14 meganuclease using the Amaxa 4D-Nucleofector (Lonza) according to the manufacturer's instructions. Cells will be immediately transduced with a recombinant AAV vector encoding a CAR flanked by homology to the TRC 1-2 recognition site locus. The B2M 13-14 meganuclease will cause deletions in the B2M gene, resulting in knockout of B2M at the cell surface, while the TRC 1-2 meganuclease will cause a double strand break at the TRC 1-2 recognition site, stimulating recombination with the AAV vector through homologous recombination. To confirm transduction efficiency, a separate group of meganuclease-transfected human CD3+ T cells will be transduced with GFP-AAV (le⁵ viral genomes per cell) immediately after transfection as described above. Cells will be analyzed by flow cytometry for GFP expression at 72 hours post-transduction to determine transduction efficiency.

[0627] As transduction-only controls, cells will be mock transfected (with water) and transduced with the recombinant AAV vector. For a meganuclease-only control, cells will be co-transfected with mRNA encoding TRC 1-2×.87 EE and mRNA encoding a B2M 13-14 meganuclease, then mock transduced (with water) immediately post-transfection.

[0628] Insertion of the chimeric antigen receptor sequence will be confirmed by sequencing of the cleavage site in the TCR alpha constant region gene. Cell-surface expression of the chimeric antigen receptor will be confirmed by flow cytometry, using an anti-Fab or, in specific cases, an anti-CD19 antibody. Knockout of the endogenous T cell receptor and B2M at the cell surface will be determined by flow cytometry as previously described.

### Example 6

### Bicistronic mRNA Encoding Two Meganucleases Targeting Separate Recognition Sequences

[0629] 1. Design and Evaluation of Bicistronic mRNA Variants

[0630] The purpose of this study was to evaluate the use of a bicistronic mRNA which simultaneously encodes two meganucleases for knockdown of multiple gene targets in human T cells. A number of variant mRNAs were designed using the TRC 1-2×.87 EE meganuclease sequence and the B2M 13-14×.479 sequence in different orientations, wherein the sequences were separated by an IRES, T2A, P2A, E2A, or F2A sequence as follows:

TABLE 10

| SEQ ID NO: | 5′ Nuclease | Peptide | 3′ Nuclease |
|---|---|---|---|
| 367 | TRC | IRES | B2M |
| 368 | TRC | T2A | B2M |
| 369 | TRC | P2A | B2M |
| 370 | TRC | E2A | B2M |
| 371 | TRC | F2A | B2M |
| 372 | B2M | IRES | TRC |
| 373 | B2M | T2A | TRC |
| 374 | B2M | P2A | TRC |
| 375 | B2M | E2A | TRC |
| 376 | B2M | F2A | TRC |

[0631] In this study, donor human T cells were stimulated with ImmunoCult (Stem Cell Technologies) which consists of multimers of anti-CD3, anti-CD28, and anti-CD2 antibodies. Stimulation was carried out for 3 days, prior to electroporation with 1 μg of one of the bicistronic mRNAs above using the Amaxa 4D-Nucleofector (Lonza) according to the manufacturer's instructions. Additionally, donor human T cells were electroporated with 1 μg of TRC1-2×.87EE mRNA or B2M13-14×.479 RNA. An additional sample of cells was electroporated with 1 μg each of both individual nuclease mRNAs. As controls, human T cells were electroporated in the absence of mRNAs. At 3 and 7 days post-electroporation, cells that were electroporated with bicistronic mRNAs were stained with an antibody against CD3 (to determine TRC knockdown) and an antibody against B2M and analyzed by flow cytometry.

[0632] Assessment of cell number and viability was conducted on day 3 (not shown) and day 7 post-electroporation, as shown in Table 11. Cytometric analysis identified cells in which the TRAC gene was edited (TRC KO), the B2M gene was edited (B2M KO), or both genes were edited (dKO) (FIGS. 15A-15N).

TABLE 11

| | Live cell # | | TRC | B2M | | # dKO |
|---|---|---|---|---|---|---|
| | d7 (×10\hat{ }6) | Viability | KO % | KO % | dKO % | (×10\hat{ }6) |
| Mock | 11.31 | 98 | 0 | 0 | 0 | |
| TRCx87EE | 8.46 | 85 | 40 | 0 | 0 | |
| B2M13-14x479 | 4.86 | 76 | 0 | 50.8 | 0 | |
| TRC + B2M | 3 | 89 | 39.4 | 36.9 | 17.1 | 0.513 |
| TRC-IRES-B2M | 5.97 | 88 | 31.2 | 32.2 | 11.3 | 0.675 |
| B2M-IRES-TRC | 5.01 | 82 | 31.1 | 44.8 | 16.3 | 0.817 |
| B2M-E2A-TRC | 5.64 | 87 | 24.8 | 44.8 | 12.6 | 0.711 |
| B2M-F2A-TRC | 6.42 | 83 | 20.6 | 31.9 | 8.13 | 0.522 |
| B2M-P2A-TRC | 6.66 | 87 | 21.9 | 37.8 | 9.18 | 0.611 |
| B2M-T2A-TRC | 6.96 | 88 | 25.1 | 45.1 | 12.8 | 0.891 |
| TRC-E2A-B2M | 8.52 | 87 | 22.9 | 28.7 | 7.4 | 0.630 |
| TRC-F2A-B2M | 9.15 | 92 | 18.4 | 29 | 6.66 | 0.609 |
| TRC-P2A-B2M | 7.68 | 85 | 30 | 28.2 | 10 | 0.768 |
| TRC-T2A-B2M | 9.12 | 93 | 28.4 | 24.8 | 8.14 | 0.742 |

[0633] As shown in Table 11 and FIGS. 15A-15N, delivery of the two nuclease RNAs individually yielded the highest frequency of dKO cells (17.1%), followed by B2M-IRES-TRC (16.3%), B2M-T2A-TRC (12.8%), B2M-E2A-TRC (12.6%), and TRC-IRES-B2M (11.3%). The remaining nucleases generated approximately half the frequency of dKO cells as the individual RNAs. The RNAs exhibited toxicity to the T cells in varying degrees. Further, while using each individual meganuclease gave the highest dKO %, the total number of dKO cells produced was highest when using B2M-T2A-TRC (0.891×10̂6), B2M-IRES-TRC (0.817×10̂6), and TRC-P2A-B2M (0.768×10̂6).

[0634] These experiments clearly demonstrate the utility of using bicistronic mRNA to deliver two meganucleases to eukaryotic cells to simultaneously edit and/or knockdown two separate gene targets, in this case the TRC and B2M recognition sequences. When considering the viability and expansion of the cells over the 7 day culture period, the cultures containing the highest frequency of dKO cells were not necessarily the ones containing the largest number of dKO cells. B2M-T2A-TRC and B2M-IRES-TRC allowed the best editing of both genes and the expansion of viable, edited cells.

2. Titration of Bicistronic mRNA

[0635] The purpose of this study was to determine the optimum concentration of bicistronic mRNAs for targeting the TRC and B2M recognition sequences in human T cells. As described in the previous Example, a number of bicistronic mRNAs were developed which comprised a TRC 1-2×.87 EE sequence and a B2M-13-14×.479 sequence for simultaneous expression and targeting in a human T cell. Among those tested, B2M-IRES-TRC, B2M-T2A-TRC, TRC-P2A-B2M, and TRC-T2A-B2M were selected for further evaluation.

[0636] Here, B2M-IRES-TRC, B2M-T2A-TRC, TRC-P2A-B2M, or TRC-T2A-B2M mRNAs were introduced into donor human T cells at increasing concentrations, and the percent knockdown of cell-surface CD3 (indicated TRC knockdown) and B2M was determined. Briefly, donor human T cells were stimulated with ImmunoCult for 3 days prior to electroporation with 1, 2, or 4 μg of the B2M-IRES-TRC, B2M-T2A-TRC, TRC-P2A-B2M, or TRC-T2A-B2M mRNAs above using the Amaxa 4D-Nucleofector (Lonza) according to the manufacturer's instructions. For comparison, donor human T cells were electroporated with 1 μg of TRC1-2×.87 EE or 1 μg of B2M13-14×.479. In addition, donor human T cells were electroporated with both nucleases encoded on separate RNA molecules, using doses of 0.5 μg of each nuclease or 1 μg of each nuclease. As controls, human T cells were electroporated with no RNA. At 7 days post-electroporation, cells were enumerated and viability was assessed using trypan blue. Cells were stained with an antibody against CD3 (to determine TRC knockdown) and an antibody against B2M and analyzed by flow cytometry, as well as Ghost Dye 780 to exclude dead cells from analysis.

[0637] As shown in FIGS. 16A-16P and Table 12, increasing the amount of bicistronic mRNA electroporated into donor human T cells generally increased the frequency of dKO cells in culture but, in some cases, reduced the overall number of viable cells present on day 7 post-electroporation.

TABLE 12

| | | live cell | | | |
|---|---|---|---|---|---|
| | μg of | # | | Target cell | Viability |
| Nuclease | RNA | (×10\hat{ }6) | dKO % | # | (%) |
| B2M-IRES-TRC | 1 | 2.45 | 4.59 | 112455 | 79 |
| B2M-IRES-TRC | 2 | 2.35 | 9.34 | 219490 | 84 |
| B2M-IRES-TRC | 4 | 2.56 | 5.35 | 136960 | 82 |
| B2M-T2A-TRC | 1 | 1.92 | 4.07 | 78144 | 67 |
| B2M-T2A-TRC | 2 | 1.77 | 11.1 | 196470 | 79 |
| B2M-T2A-TRC | 4 | 2.23 | 13.4 | 298820 | 87 |
| TRC-P2A-B2M | 1 | 2.14 | 3.86 | 82604 | 83 |
| TRC-P2A-B2M | 2 | 2.39 | 7.82 | 186898 | 79 |
| TRC-P2A-B2M | 4 | 1.62 | 12.1 | 196020 | 73 |
| TRC-T2A-B2M | 1 | 2.23 | 6.65 | 148295 | 87 |
| TRC-T2A-B2M | 2 | 1.43 | 8.89 | 127127 | 83 |
| TRC-T2A-B2M | 4 | 1.01 | 11 | 111100 | 80 |
| TRC | 1 | 2.7 | | | 83 |
| B2M | 1 | 2.97 | | | 94 |
| TRC + B2M | 0.5 + 0.5 | 3.2 | 2.73 | 87360 | 85 |
| TRC + B2M | 1 + 1 | 3.05 | 9.19 | 280295 | 85 |

[0638] For B2M-IRES-TRC, higher doses of RNA were well-tolerated, but did not always increase the dKO cell frequency or number. For B2M-T2A-TRC, higher amounts of RNA were well tolerated and yielded a higher dKO frequency and more dKO cells. This was also the case for TRC-P2A-B2M, although cell viability was decreased at higher RNA doses. TRC-T2A-B2M appeared to be well tolerated at high doses, but evidently did not allow for robust cell expansion. In this experiment, B2M-T2A-TRC appears to generate a slightly higher frequency and number of dKO cells than electroporating T cells with the two nucleases on separate mRNA molecules.

[0639] Therefore, by increasing the amount of bicistronic mRNA, greater frequencies and numbers of dKO cells could be achieved. Specifically, 4 μg of B2M-T2A-TRC yielded the most target cells in this experiment, outperforming 1 μg of each of TRC and B2M separately.

### Example 7

### Production of Anti-CD19 CAR T Cells Using Bicistronic mRNA and AAV

### 1. ELECTROPORATION OF T CELLS WITH BICISTRONIC MRNA AND TRANSDUCTION WITH AAV

[0640] The purpose of this study was to evaluate the use of bicistronic mRNA for producing CD19 CAR-T cells with double knockout of the T cell receptor and B2M. As described in the previous Examples, a number of bicistronic mRNAs were developed which comprised a TRC 1-2×.87 EE sequence and B2M 13-14×.479 sequence for simultaneous expression and targeting in a human T cell. Among those tested, B2M-IRES-TRC was selected for further evaluation after determining their optimal concentration.

[0641] Here, B2M-IRES-TRC was used in conjunction with an AAV vector to introduce an exogenous nucleic acid sequence, encoding a chimeric antigen receptor, into the genome of human T cells at the TRC 1-2 recognition sequence via homologous recombination, while simultaneously knocking out cell-surface expression of both the T cell receptor and B2M. The AAV vector comprised a nucleic acid comprising the anti-CD19 CAR coding sequence previously described, which was flanked by homology arms. Expression of the CAR cassette was driven by a JeT promoter. The AAV vector was prepared by Virovek (Hayward, Calif.) from a donor plasmid.

[0642] In these experiments, donor human T cells were obtained and stimulated with ImmunoCult (Stem Cell Technologies) for 3 days prior to electroporation. 3 μg/1×10⁶ cells were then electroporated with the bicistronic B2M-IRES-TRC mRNA described above using the Amaxa 4D-Nucleofector (Lonza) according to the manufacturer's instructions. Cells were immediately transduced with a recombinant AAV vector encoding an anti-CD19 CAR flanked by homology arms to the TRC 1-2 recognition site locus. As controls, cells were electroporated with 1 μg of TRC 1-2×87EE RNA prior to AAV transduction. In addition, B2M-IRES-TRC and TRC 1-2×.87 EE electroporated cells were mock transduced.

[0643] At 3 and 6 days post-electroporation/transduction, edited cells were stained with an antibody against CD3 (to determine TRC knockdown) and an antibody against B2M, as well as a biotinylated recombinant CD19-Fc fusion protein to detect the CAR. Streptavidin-PE was used as the secondary detection reagent for CAR staining. CD3, B2m, and CAR levels were assessed by flow cytometry.

### 2. RESULTS

[0644] Cytometric measurements of CD3, B2M, and CAR expression levels were performed at day 6 post-electroporation and appear in FIGS. 17A-17H. TRC 1-2×.87 EE generated a population of CD3⁻ events (67.3%) (FIG. 17A) but did not alter B2M expression. B2M-IRES-TRC generated populations lacking CD3 expression (17.3%), B2M expression (19.7%), or the expression of both markers (30.7%) (17B). Mock transduced cultures were used to set the baseline for CAR staining (17C and 17D), and CAR expression was determined for transduced cultures electroporated with either TRC 1-2×.87 EE (22.2% CD3⁻/CAR⁺) (17E) or B2M-IRES-TRC (15.7% CD3⁻/CAR⁺) (17F). Gating on the CAR⁺/CD3⁻ events shows that 67% of CAR T cells lacked cell-surface B2M expression in B2M-IRES-TRC cultures (17H).

### 3. CONCLUSIONS

[0645] The bicistronic mRNA was effective when used in combination with an AAV for producing CAR-T cells that are negative for cell-surface TRC and B2M.

The application's sequence listing, which the Patent Office published only in electronic form, follows.

SEQUENCE LISTING (376 sequences)

SEQ ID NO: 1 - DNA, 13673 bp, Homo sapiens
tgacaacttaacactgattactcatagaggcactgccatggtggtcttggataagatctggaagaattctctggattaccaggcagagactcttattgtcttcccttattttcccccaggcaaagtctgtctttctgtgatcagctgcctggagttgggggagaagtgacacaaacacccctgtgaccaccactgggactgtgcagggtcagacgtgaagccagcatagtactgggtcttgcccaaggcctatggtaaccaccgcctggctactacctatgttcactcaaggccctatggctctaaaatcagcaggtggcaaagccagccaagcttatgtccctctctttagggtggcaagtttcccccagcctggggtgaatccagagatgccttccaggaactggggcctagtcagaaaccttaggaatctacctggtactctattgcactgaggctgaactggcacccaagccacaagacaaagtccttcccacttttccctcccctttccacaagctgaggagtctcttgccatggccacttccaccccaggcctgtggtgggtactgtctggctactgctgatgtatactcaaggcccaagggctctgcagtaagcttgtggtgaacgctgcccagcctgggactcacccttcagggaagcaggctcccctctggcccagagcaggtccaggaatgctatctaagagccaaagcctggaatcagggaccttaagaggccacttggtattctaaccccacagtggccaagtcccctttactctttccacttcttttctcaagcagaaggaatttctccccatagccaccacagctgtaatgtgctgggtcacaccttaagcctgcacgtctctgagtctcacccaaagcccatgatgagtactacctggctacttctgattattcagggccaaagggctctttagtcagctggtgaggaatcctgccaggactggtccttcccttcaaggcagcaggttcccttctggcccagggtgtggctagaaatgtcagcttggagctatggcctggaatgtgggcctcaggactttgcctggtgccctatcctactgcagctgagctggtatccaatgcaagacaaactcatctttgttcttccctctcctcttctcaagcagaggaaagaagtctctctctgagctttgagctgccctgcctggggttgggagaggggtggtgcaagcaatcccttggccatcccagctagtgtctcactaggttgtgtgccccccacattcactggctctgagcccagcacagcaccaggacttacccaggaattgccatccttgtggcctagactgcctttcaagtttatgtagaacctcagagcacttcagcccatggtggggaggcttactggaactcaggttcccactgctgggatgggtgatttgcctctagctagggctggtctaaatgatccctccatgggacctgggtgagttcttcccagtgttgctttgtgctatgactgggcagcactgagttccaatgcaaagtctgaaaatcactgcactcttcctctcccagaagcacacattctctctccatgccaggtggccgctgccggcgaatgggggagagatagcatttagcaattcaagactgtcttaccctcttcagttactctttcagtgatacgaagttaaaaccaggtactgtgatcactcacctgatttttggttcttatgaaggtgcttttttttgtgtggatcattattcaatttggtgttcctgcagggagcaggattagtggaggcgtctattcagccatcttgctccacctcccctagctatgtccttttaaatatttataatcgacatacaatatattacacttaaagtatacaataagttctaaaatataactgaaatcatcatcgaactctagataattaacatatccatcaaccctaaagtttcctcatgtttagatgatctcctttccctctagaaaccactcatctactttctgtcatatagattatagtttgccttttctggagttttatataaacagaatcatatagtatatgttcttttctgtctgacttcttttatttaccatgattatttcatccatgttacatgtatcaacagtttattccttgtttgttgatgatagtatttcattgtatggatatatactccaatgggtttattcatttacctgttgatgtatgttggatcgtttctagttttcagctatcacaaataaaactgctataaacattaaacattaatgtccaagtctttgtatagacatatgctttcattttctcttgggcaaataccttgggtggagtggctggatattatggccagtgtatgtttaactttataaagagctgtcgaagtgttttcctttttcttttttctttttgagatgaagtcttgctctgttgcccaggctggagtgcagtggtgcaatctcggctcattgcaacctctgcctcccaggttcaagcaattctcctgcctcagcctcctgagtagttggggttacagatgcctgccaccatgcctagctaatttttgtatttttagtagagacagggtttcaccatgttggccaggctggtctcaaactcctgatctcaagtgatctgcccgccttgacctcccaaagtgctcagattacaggtgtgagccaccacatccagccccaaattgtttataccattttatattcctaccaggattgtatgagagttccagttcttctaaattcttgccaacatttactactttgaataaatgttcattgtaaaaaaattttaagagggttatataggggaaaaaaaggccgctattaatctgttaattgcactactgggagataaagctattaaactgtcatatttgtggctgggcgtggtaacacatgcttgtgatcctagcactttaggaggctggggaaggaggatcacttgagaccaggagttcgagaccagcctgggcaacacagcaagactctgtctccacaaaaatattaaaaattaaaaaaaaaagaaattgtcatgtttgtagacttcccaaatttgccatcctaggcaaacagtgctcttgtttttaaacaaatagttgtatacataattttccccctcactattcaaaacatgtcataaatggtaagtccaagaaaaatacaggtattcccccccaaagaaaactgtaaaatcgacttttttctatctgtactgttttttattggtttttaaattggttttccaagtgagtaaatcagaatctatctgtaatggattttaaatttagtgtttctctgtgatgtagtaaacaagaaactagaggcaaaaatagccctgtcccttgctaaacttctaaggcacttttctagtacaactcaacactaacatttcaggcctttagtgccttatatgagtttttaaaagggggaaaagggagggagcaagagtgtcttaactcatacatttaggcataacaattattctcatattttagttattgagagggctggtagaaaaactaggtaaataatattaataattatagcgcttattaaacactacagaacacttactatgtaccaggcattgtgggaggctctctcttgtgcattatctcatttcattaggtccatggagagtattgcattttcttagtttaggcatggcctccacaataaagattatcaaaagcctaaaaatatgtaaaagaaacctagaagttatttgttgtgctccttggggaagctaggcaaatcctttcaactgaaaaccatggtgacttccaagatctctgcccctccccatcgccatggtccacttcctcttctcactgttcctcttagaaaagatctgtggactccaccaccacgaaatggcggcaccttatttatggtcactttagagggtaggttttcttaatgggtctgcctgtcatgtttaacgtccttggctgggtccaaggcagatgcagtccaaactctcactaaaattgccgagccctttgtcttccagtgtctaaaatattaatgtcaatggaatcaggccagagtttgaattctagtctcttagcctttgtttcccctgtccataaaatgaatgggggtaattctttcctcctacagtttatttatatattcactaattcattcattcatccatccattcgttcattcggtttactgagtacctactatgtgccagcccctgttctagggtggaaactaagagaatgatgtacctagagggcgctggaagctctaaagccctagcagttactgcttttactattagtggtcgtttttttctcccccccgccccccgacaaatcaacagaacaaagaaaattacctaaacagcaaggacatagggaggaacttcttggcacagaactttccaaacactttttcctgaagggatacaagaagcaagaaaggtactctttcactaggaccttctctgagctgtcctcaggatgcttttgggactatttttcttacccagagaatggagaaaccctgcagggaattcccaagctgtagttataaacagaagttctccttctgctaggtagcattcaaagatcttaatcttctgggtttccgttttctcgaatgaaaaatgcaggtccgagcagttaactggctggggcaccattagcaagtcacttagcatctctggggccagtctgcaaagcgagggggcagccttaatgtgcctccagcctgaagtcctagaatgagcgcccggtgtcccaagctggggcgcgcaccccagatcggagggcgccgatgtacagacagcaaactcacccagtctagtgcatgccttcttaaacatcacgagactctaagaaaaggaaactgaaaacgggaaagtccctctctctaacctggcactgcgtcgctggcttggagacaggtgacggtccctgcgggccttgtcctgattggctgggcacgcgtttaatataagtggaggcgtcgcgctggcgggcattcctgaagctgacagcattcgggccgagatgtctcgctccgtggccttagctgtgctcgcgctactctctctttctggcctggaggctatccagcgtgagtctctcctaccctcccgctctggtccttcctctcccgctctgcaccctctgtggccctcgctgtgctctctcgctccgtgacttcccttctccaagttctccttggtggcccgccgtggggctagtccagggctggatctcggggaagcggcggggtggcctgggagtggggaagggggtgcgcacccgggacgcgcgctacttgcccctttcggcggggagcaggggagacctttggcctacggcgacgggagggtcgggacaaagtttagggcgtcgataagcgtcagagcgccgaggttgggggagggtttctcttccgctctttcgcggggcctctggctcccccagcgcagctggagtgggggacgggtaggctcgtcccaaaggcgcggcgctgaggtttgtgaacgcgtggaggggcgcttggggtctgggggaggcgtcgcccgggtaagcctgtctgctgcggctctgcttcccttagactggagagctgtggacttcgtctaggcgcccgctaagttcgcatgtcctagcacctctgggtctatgtggggccacaccgtggggaggaaacagcacgcgacgtttgtagaatgcttggctgtgatacaaagcggtttcgaataattaacttatttgttcccatcacatgtcacttttaaaaaattataagaactacccgttattgacatctttctgtgtgccaaggactttatgtgctttgcgtcatttaattttgaaaacagttatcttccgccatagataactactatggttatcttctgcctctcacagatgaagaaactaaggcaccgagattttaagaaacttaattacacaggggataaatggcagcaatcgagattgaagtcaagcctaaccagggcttttgcgggagcgcatgccttttggctgtaattcgtgcatttttttttaagaaaaacgcctgccttctgcgtgagattctccagagcaaactgggcggcatgggccctgtggtcttttcgtacagagggcttcctctttggctctttgcctggttgtttccaagatgtactgtgcctcttactttcggttttgaaaacatgagggggttgggcgtggtagcttacgcctgtaatcccagcacttagggaggccgaggcgggaggatggcttgaggtccgtagttgagaccagcctggccaacatggtgaagcctggtctctacaaaaaataataacaaaaattagccgggtgtggtggctcgtgcctgtggtcccagctgctccggtggctgaggcgggaggatctcttgagcttaggcttttgagctatcatggcgccagtgcactccagcgtgggcaacagagcgagaccctgtctctcaaaaaagaaaaaaaaaaaaaaagaaagagaaaagaaaagaaagaaagaagtgaaggtttgtcagtcaggggagctgtaaaaccattaataaagataatccaagatggttaccaagactgttgaggacgccagagatcttgagcactttctaagtacctggcaatacactaagcgcgctcaccttttcctctggcaaaacatgatcgaaagcagaatgttttgatcatgagaaaattgcatttaatttgaatacaatttatttacaacataaaggataatgtatatatcaccaccattactggtatttgctggttatgttagatgtcattttaaaaaataacaatctgatatttaaaaaaaaatcttattttgaaaatttccaaagtaatacatgccatgcatagaccatttctggaagataccacaagaaacatgtaatgatgattgcctctgaaggtctattttcctcctctgacctgtgtgtgggttttgtttttgttttactgtgggcataaattaatttttcagttaagttttggaagcttaaataactctccaaaagtcataaagccagtaactggttgagcccaaattcaaacccagcctgtctgatacttgtcctcttcttagaaaagattacagtgatgctctcacaaaatcttgccgccttccctcaaacagagagttccaggcaggatgaatctgtgctctgatccctgaggcatttaatatgttcttattattagaagctcagatgcaaagagctctcttagcttttaatgttatgaaaaaaatcaggtcttcattagattccccaatccacctcttgatggggctagtagcctttccttaatgatagggtgtttctagagagatatatctggtcaaggtggcctggtactcctccttctccccacagcctcccagacaaggaggagtagctgccttttagtgatcatgtaccctgaatataagtgtatttaaaagaattttatacacatatatttagtgtcaatctgtatatttagtagcactaacacttctcttcattttcaatgaaaaatatagagtttataatattttcttcccacttccccatggatggtctagtcatgcctctcattttggaaagtactgtttctgaaacattaggcaatatattcccaacctggctagtttacagcaatcacctgtggatgctaattaaaacgcaaatcccactgtcacatgcattactccatttgatcataatggaaagtatgttctgtcccatttgccatagtcctcacctatccctgttgtattttatcgggtccaactcaaccatttaaggtatttgccagctcttgtatgcatttaggttttgtttctttgttttttagctcatgaaattaggtacaaagtcagagaggggtctggcatataaaacctcagcagaaataaagaggttttgttgtttggtaagaacataccttgggttggttgggcacggtggctcgtgcctgtaatcccaacactttgggaggccaaggcaggctgatcacttgaagttgggagttcaagaccagcctggccaacatggtgaaatcccgtctctactgaaaatacaaaaattaaccaggcatggtggtgtgtgcctgtagtcccaggaatcacttgaacccaggaggcggaggttgcagtgagctgagatctcaccactgcacactgcactccagcctgggcaatggaatgagattccatcccaaaaaataaaaaaataaaaaaataaagaacataccttgggttgatccacttaggaacctcagataataacatctgccacgtatagagcaattgctatgtcccaggcactctactagacacttcatacagtttagaaaatcagatgggtgtagatcaaggcaggagcaggaaccaaaaagaaaggcataaacataagaaaaaaaatggaaggggtggaaacagagtacaataacatgagtaatttgatgggggctattatgaactgagaaatgaactttgaaaagtatcttggggccaaatcatgtagactcttgagtgatgtgttaaggaatgctatgagtgctgagagggcatcagaagtccttgagagcctccagagaaaggctcttaaaaatgcagcgcaatctccagtgacagaagatactgctagaaatctgctagaaaaaaaacaaaaaaggcatgtatagaggaattatgagggaaagataccaagtcacggtttattcttcaaaatggaggtggcttgttgggaaggtggaagctcatttggccagagtggaaatggaattgggagaaatcgatgaccaaatgtaaacacttggtgcctgatatagcttgacaccaagttagccccaagtgaaataccctggcaatattaatgtgtcttttcccgatattcctcaggtactccaaagattcaggtttactcacgtcatccagcagagaatggaaagtcaaatttcctgaattgctatgtgtctgggtttcatccatccgacattgaagttgacttactgaagaatggagagagaattgaaaaagtggagcattcagacttgtctttcagcaaggactggtctttctatctcttgtactacactgaattcacccccactgaaaaagatgagtatgcctgccgtgtgaaccatgtgactttgtcacagcccaagatagttaagtggggtaagtcttacattcttttgtaagctgctgaaagttgtgtatgagtagtcatatcataaagctgctttgatataaaaaaggtctatggccatactaccctgaatgagtcccatcccatctgatataaacaatctgcatattgggattgtcagggaatgttcttaaagatcagattagtggcacctgctgagatactgatgcacagcatggtttctgaaccagtagtttccctgcagttgagcagggagcagcagcagcacttgcacaaatacatatacactcttaacacttcttacctactggcttcctctagcttttgtggcagcttcaggtatatttagcactgaacgaacatctcaagaaggtataggcctttgtttgtaagtcctgctgtcctagcatcctataatcctggacttctccagtactttctggctggattggtatctgaggctagtaggaagggcttgttcctgctgggtagctctaaacaatgtattcatgggtaggaacagcagcctattctgccagccttatttctaaccattttagacatttgttagtacatggtattttaaaagtaaaacttaatgtcttccttttttttctccactgtctttttcatagatcgagacatgtaagcagcatcatggaggtaagtttttgaccttgagaaaatgtttttgtttcactgtcctgaggactatttatagacagctctaacatgataaccctcactatgtggagaacattgacagagtaacattttagcagggaaagaagaatcctacagggtcatgttcccttctcctgtggagtggcatgaagaaggtgtatggccccaggtatggccatattactgaccctctacagagagggcaaaggaactgccagtatggtattgcaggataaaggcaggtggttacccacattacctgcaaggctttgatctttcttctgccatttccacattggacatctctgctgaggagagaaaatgaaccactcttttcctttgtataatgttgttttattcttcagacagaagagaggagttatacagctctgcagacatcccattcctgtatggggactgtgtttgcctcttagaggttcccaggccactagaggagataaagggaaacagattgttataacttgatataatgatactataatagatgtaactacaaggagctccagaagcaagagagagggaggaacttggacttctctgcatctttagttggagtccaaaggcttttcaatgaaattctactgcccagggtacattgatgctgaaaccccattcaaatctcctgttatattctagaacagggaattgatttgggagagcatcaggaaggtggatgatctgcccagtcacactgttagtaaattgtagagccaggacctgaactctaatatagtcatgtgttacttaatgacggggacatgttctgagaaatgcttacacaaacctaggtgttgtagcctactacacgcataggctacatggtatagcctattgctcctagactacaaacctgtacagcctgttactgtactgaatactgtgggcagttgtaacacaatggtaagtatttgtgtatctaaacatagaagttgcagtaaaaatatgctattttaatcttatgagaccactgtcatatatacagtccatcattgaccaaaacatcatatcagcattttttcttctaagattttgggagcaccaaagggatacactaacaggatatactctttataatgggtttggagaactgtctgcagctacttcttttaaaaaggtgatctacacagtagaaattagacaagtttggtaatgagatctgcaatccaaataaaataaattcattgctaacctttttcttttcttttcaggtttgaagatgccgcatttggattggatgaattccaaattctgcttgcttgctttttaatattgatatgcttatacacttacactttatgcacaaaatgtagggttataataatgttaacatggacatgatcttctttataattctactttgagtgctgtctccatgtttgatgtatctgagcaggttgctccacaggtagctctaggagggctggcaacttagaggtggggagcagagaattctcttatccaacatcaacatcttggtcagatttgaactcttcaatctcttgcactcaaagcttgttaagatagttaagcgtgcataagttaacttccaatttacatactctgcttagaatttgggggaaaatttagaaatataattgacaggattattggaaatttgttataatgaatgaaacattttgtcatataagattcatatttacttcttatacatttgataaagtaaggcatggttgtggttaatctggtttatttttgttccacaagttaaataaatcataaaacttgatgtgttatctcttatatctcactcccactattacccctttattttcaaacagggaaacagtcttcaagttccacttggtaaaaaatgtgaaccccttgtatatagagtttggctcacagtgtaaagggcctcagtgattcacattttccagattaggaatctgatgctcaaagaagttaaatggcatagttggggtgacacagctgtctagtgggaggccagccttctatattttagccagcgttctttcctgcgggccaggtcatgaggagtatgcagactctaagagggagcaaaagtatctgaaggatttaatattttagcaaggaatagatatacaatcatcccttggtctccctgggggattggtttcaggaccccttcttggacaccaaatctatggatatttaagtcccttctataaaatggtatagtatttgcatataacctatccacatcctcctgtatactttaaatcatttctagattacttgtaatacctaatacaatgtaaatgctatgcaaatagttgttattgtttaaggaataatgacaagaaaaaaaagtctgtacatgctcagtaaagacacaaccatccctttttttccccagtgtttttgatccatggtttgctgaatccacagatgtggagcccctggatacggaaggcccgctgtactttgaatgacaaataacagatttaaaattttcaaggcatagttttatacctgatggccagctttgtttatttgaccaagaatctgagttagctagttctaggtactgacaggataaataaaacacaacactgctcccgatcttctcagtttagcagagggacagatatgcactcaaataattaaaatatatcctgataagaatatagcataggtacgcgcgaagaacttggcaatcgaaattttgttgttcaggctgggcgaggtgtctcatgtctgtaatcccagcactttgggaggccatggtaggatgatcgcttgagcccaggagtccgagaccagcctgggcaacataacaagaccctgtctcaattcaaagaattgaattaaaaaaaacaaaaaataatttttttaaaaaagaaatgttgttgttcaaggaacaacaacaaaaatctagggaggtgttagagaagccatttgcctgagctgagagtaagttgctagtggttctcttgattggtaggtggggcctgggtttccaggcatggtagccaggaaggacagccacatggcaggtttgggtaattccaaacagtggaggaagggtgtctgggggaagacttgtaggaactcagctgaaaaaattgggggatgatactctgaaagaaaaacaaagttttaaaatttctactcttacacttaacacataatgcttctgtgaccggatatttaggggttttccccccacactctgttaggagaaaaattttagacagattaaatttaacagagtttaactgagcaaaaatgattctcgaaccaggcagctgccggagccagaataggttcaaaatgactctgggggtgccacatggttggatgacatttagggacagaaaaaggaaagtgatgtgcagaaaatggaagtcaggggcagaagcagccagattggttgcagttcagcatttgcctcatttaaacagggtttgaagagttggccacctgtgattggctgagactctgtggtataagagtaagttacagtctgtttacacatccagttaggttacagttcactatgcagagagaaatctttagcctgaacttacacagggaggcagttttatttatttatttaattttttttttttgagacaaggtctcactctgtcacccgggctggagttcagtggtatgatcatggcttattgcagcctcgacttcctggcctcaagcaatccttccgcctcaggctctagagtagctgggactacaggcacatgtcagcatgcctggctaattttgttttttaatttttagtagagatgaactcctgg

SEQ ID NO: 2 - DNA, 22 bp, Homo sapiens
ctatctcttgtactacactgaa

SEQ ID NO: 3 - DNA, 22 bp, Homo sapiens
gatagagaacatgatgtgactt

SEQ ID NO: 4 - DNA, 22 bp, Homo sapiens
caggtttactcacgtcatccag

SEQ ID NO: 5 - DNA, 22 bp, Homo sapiens
gtccaaatgagtgcagtaggtc

SEQ ID NO: 6 - DNA, 22 bp, Homo sapiens
gtgactttgtcacagcccaaga

SEQ ID NO: 7 - DNA, 22 bp, Homo sapiens
cactgaaacagtgtcgggttct

SEQ ID NO: 8 - DNA, 22 bp, Homo sapiens
cgagatgtctcgctccgtggcc

SEQ ID NO: 9 - DNA, 22 bp, Homo sapiens
gctctacagagcgaggcaccgg

SEQ ID NO: 10 - protein, 163 aa, Chlamydomonas reinhardtii
MNTKYNKEFLLYLAGFVDGDGSIIAQIKPNQSYKFKHQLSLAFQVTQKTQRRWFLDKLVDEIGVGYVRDRGSVSDYILSEIKPLHNFLTQLQPFLKLKQKQANLVLKIIWRLPSAKESPDKFLEVCTWVDQIAALNDSKTRKTTSETVRAVLDSLSEKKKSSP

SEQ ID NO: 11 - protein, 9 aa, Chlamydomonas reinhardtii
LAGLIDADG

SEQ ID NO: 12 - protein, 354 aa, Artificial Sequence
  Synthesized
MNTKYNKEFLLYLAGFVDGDGSIYASIQPRQRSKFKHSLQLYFNVGQKTQRRWFLDKLVDEIGVGYVYDHGSVSEYRLSEIKPLHNFLTQLQPFLKLKQKQANLVLKIIEQLPSAKESPDKFLEVCTWVDQIAALNDSKTRKTTSETVRAVLDSLPGSVGGLSPSQASSAASSASSSPGSGISEALRAGAGSGTGYNKEFLLYLAGFVDGDGSIYARIKPAQNLKFKHALHLEFRVTQKTQRRWFLDKLVDEIGVGHVYDVGSVSDYRLSEIKPLHNFLTQLQPFLKLKQKQANLVLKIIEQLPSAKESPDKFLEVCTWVDQIAALNDSKTRKTTSETVRAVLDSLSEKKKSSP

SEQ ID NO: 13 - protein, 354 aa, Artificial Sequence
  Synthesized
MNTKYNKEFLLYLAGFVDGDGSIYASIQPRQHSKFKHSLQLYFNVGQKTQRRWFLDKLVDEIGVGYVYDHGSVSEYRLSEIKPLHNFLTQLQPFLKLKQKQANLVLKIIEQLPSAKESPDKFLEVCTWVDQIAALNDSKTRKTTSETVRAVLDSLPGSVGGLSPSQASSAASSASSSPGSGISEALRAGAGSGTGYNKEFLLYLAGFVDGDGSIYASIKPCQCLKFKHQLFLEFRVTQKTQRRWFLDKLVDEIGVGHVYDSGSVSDYRLSEIKPLHNFLTQLQPFLKLKQKQANLVLKIIEQLPSAKESPDKFLEVCTWVDQIAALNDSKTRKTTSETVRAVLDSLSEKKKSSP

SEQ ID NO: 14 - protein, 354 aa, Artificial Sequence
  Synthesized
MNTKYNKEFLLYLAGFVDGDGSIYASIQPRQAAKFKHTLQLYFNVGQKTQRRWFLDKLVDEIGVGYVYDHGSVSEYRLSEIKPLHNFLTQLQPFLKLKQKQANLVLKIIEQLPSAKESPDKFLEVCTWVDQIAALNDSKTRKTTSETVRAVLDSLPGSVGGLSPSQASSAASSASSSPGSGISEALRAGAGSGTGYNKEFLLYLAGFVDGDGSIYAVIKPNQALKFKHTLSLEFRVSQKTQRRWFLDKLVDEIGVGHVYDFGSVSEYRLSEIKPLHNFLTQLQPFLKLKQKQANLVLKIIEQLPSAKESPDKFLEVCTWVDQIAALNDSKTRKTTSETVRAVLDSLSEKKKSSP

SEQ ID NO: 15 - protein, 354 aa, Artificial Sequence
  Synthesized
MNTKYNKEFLLYLAGFVDGDGSIYASIQPRQHSKFKHSLQLYFNVGQKTQRRWFLDKLVDEIGVGYVYDHGSVSEYRLSEIKPLHNFLTQLQPFLKLKQKQANLVLKIIEQLPSAKESPDKFLEVCTWVDQIAALNDSKTRKTTSETVRAVLDSLPGSVGGLSPSQASSAASSASSSPGSGISEALRAGAGSGTGYNKEFLLYLAGFVDGDGSIYASIKPNQTLKFKHALSLEFRVAQKTQRRWFLDKLVDEIGVGHVYDFGSVSEYRLSEIKPLHNFLTQLQPFLKLKQKQANLVLKIIEQLPSAKESPDKFLEVCTWVDQIAALNDSKTRKTTSETVRAVLDSLSEKKKSSP

SEQ ID NO: 16 - protein, 354 aa, Artificial Sequence
  Synthesized
MNTKYNKEFLLYLAGFVDGDGSIYASIQPRQAAKFKHTLQLYFNVGQKTQRRWFLDKLVDEIGVGYVYDHGSVSEYRLSEIKPLHNFLTQLQPFLKLKQKQANLVLKIIEQLPSAKESPDKFLEVCTWVDQIAALNDSKTRKTTSETVRAVLDSLPGSVGGLSPSQASSAASSASSSPGSGISEALRAGAGSGTGYNKEFLLYLAGFVDGDGSIYASIKPNQTLKFKHALSLEFRVAQKTQRRWFLDKLVDEIGVGHVYDFGSVSEYRLSEIKPLHNFLTQLQPFLKLKQKQANLVLKIIEQLPSAKESPDKFLEVCTWVDQIAALNDSKTRKTTSETVRAVLDSLSEKKKSSP

SEQ ID NO: 17 - protein, 354 aa, Artificial Sequence
  Synthesized
MNTKYNKEFLLYLAGFVDGDGSIYASIRPQQSAKFKHNLQLYFNVGQKTQRRWFLDKLVDEIGVGYVYDHGSVSEYRLSQIKPLHNFLTQLQPFLKLKQKQANLVLKIIEQLPSAKESPDKFLEVCTWVDQIAALNDSKTRKTTSETVRAVLDSLPGSVGGLSPSQASSAASSASSSPGSGISEALRAGAGSGTGYNKEFLLYLAGFVDGDGSIYASIKPNQTLKFKHALSLEFRVAQKTQRRWFLDKLVDEIGVGHVYDFGSVSEYRLSQIKPLHNFLTQLQPFLKLKQKQANLVLKIIEQLPSAKESPDKFLEVCTWVDQIAALNDSKTRKTTSETVRAVLDSLSEKKKSSP

SEQ ID NO: 18 - protein, 354 aa, Artificial Sequence
  Synthesized
MNTKYNKEFLLYLAGFVDGDGSIYASIRPQQSAKFKHNLQLYFNVGQKTQRRWFLDKLVDEIGVGYVYDHGSVSEYRLSQIKPLHNFLTQLQPFLKLKQKQANLVLKIIEQLPSAKESPDKFLEVCTWVDQIAALNDSKTRKTTSETVRAVLDSLPGSVGGLSPSQASSAASSASSSPGSGISEALRAGAGSGTGYNKEFLLYLAGFVDGDGSIYASIKPNQTLKFKHALSLEFRVAQKTQRRWFLDKLVDEIGVGHVYDFGSVSEYRLSEIKPLHNFLTQLQPFLKLKQKQANLVLKIIEQLPSAKESPDKFLEVCTWVDQIAALNDSKTRKTTSETVRAVLDSLSEKKKSSP

SEQ ID NO: 19 - protein, 354 aa, Artificial Sequence
  Synthesized
MNTKYNKEFLLYLAGFVDGDGSIYASIRPQQSAKFKHNLQLYFNVGQKTQRRWFLDKLVDEIGVGYVYDHGSVSEYRLSEIKPLHNFLTQLQPFLKLKQKQANLVLKIIEQLPSAKESPDKFLEVCTWVDQIAALNDSKTRKTTSETVRAVLDSLPGSVGGLSPSQASSAASSASSSPGSGISEALRAGAGSGTGYNKEFLLYLAGFVDGDGSIYASIKPNQTLKFKHALSLEFRVAQKTQRRWFLDKLVDEIGVGHVYDFGSVSEYRLSQIKPLHNFLTQLQPFLKLKQKQANLVLKIIEQLPSAKESPDKFLEVCTWVDQIAALNDSKTRKTTSETVRAVLDSLSEKKKSSP

SEQ ID NO: 20 - protein, 354 aa, Artificial Sequence
  Synthesized
MNTKYNKEFLLYLAGFVDGDGSIYASIRPQQSAKFKHNLQLYFNVGQKTQRRWFLDKLVDEIGVGYVYDHGSVSEYRLSEIKPLHNFLTQLQPFLKLKQKQANLVLKIIEQLPSAKESPDKFLEVCTWVDQIAALNDSKTRKTTSETVRAVLDSLPGSVGGLSPSQASSAASSASSSPGSGISEALRAGAGSGTGYNKEFLLYLAGFVDGDGSIYASIKPNQTLKFKHALSLEFRVAQKTQRRWFLDKLVDEIGVGHVYDFGSVSEYRLSEIKPLHNFLTQLQPFLKLKQKQANLVLKIIEQLPSAKESPDKFLEVCTWVDQIAALNDSKTRKTTSETVRAVLDSLSEKKKSSP

SEQ ID NO: 21 - protein, 354 aa, Artificial Sequence; identical to SEQ ID NO: 17
  Synthesized

SEQ ID NO: 22 - protein, 354 aa, Artificial Sequence
  Synthesized
MNTKYNKEFLLYLAGFVDGDGSIYASIRPQQSAKFKHNLQLYFNVGQKTQRRWFLDKLVDEIGVGKVYDHGSVSEYRLSQIKPLHNFLTQLQPFLKLKQKQANLVLKIIEQLPSAKESPDKFLEVCTWVDQIAALNDSKTRKTTSETVRAVLDSLPGSVGGLSPSQASSAASSASSSPGSGISEALRAGAGSGTGYNKEFLLYLAGFVDGDGSIYASIKPNQTLKFKHALSLEFRVAQKTQRRWFLDKLVDEIGVGHVYDFGSVSEYRLSQIKPLHNFLTQLQPFLKLKQKQANLVLKIIEQLPSAKESPDKFLEVCTWVDQIAALNDSKTRKTTSETVRAVLDSLSEKKKSSP

SEQ ID NO: 23 - protein, 354 aa, Artificial Sequence
  Synthesized
MNTKYNKEFLLYLAGFVDGDGSIYASIRPQQSAKFKHNLQLYFNVGQKTQRRWFLDKLVDEIGVGRVYDHGSVSEYRLSQIKPLHNFLTQLQPFLKLKQKQANLVLKIIEQLPSAKESPDKFLEVCTWVDQIAALNDSKTRKTTSETVRAVLDSLPGSVGGLSPSQASSAASSASSSPGSGISEALRAGAGSGTGYNKEFLLYLAGFVDGDGSIYASIKPNQTLKFKHALSLEFRVAQKTQRRWFLDKLVDEIGVGHVYDFGSVSEYRLSQIKPLHNFLTQLQPFLKLKQKQANLVLKIIEQLPSAKESPDKFLEVCTWVDQIAALNDSKTRKTTSETVRAVLDSLSEKKKSSP

SEQ ID NO: 24 - protein, 354 aa, Artificial Sequence; identical to SEQ ID NO: 20
  Synthesized

SEQ ID NO: 25 - protein, 354 aa, Artificial Sequence
  Synthesized
MNTKYNKEFLLYLAGFVDGDGSIYASIRPQQSAKFKHNLQLYFNVGQKTQRRWFLDKLVDEIGVGKVYDHGSVSEYRLSEIKPLHNFLTQLQPFLKLKQKQANLVLKIIEQLPSAKESPDKFLEVCTWVDQIAALNDSKTRKTTSETVRAVLDSLPGSVGGLSPSQASSAASSASSSPGSGISEALRAGAGSGTGYNKEFLLYLAGFVDGDGSIYASIKPNQTLKFKHALSLEFRVAQKTQRRWFLDKLVDEIGVGHVYDFGSVSEYRLSEIKPLHNFLTQLQPFLKLKQKQANLVLKIIEQLPSAKESPDKFLEVCTWVDQIAALNDSKTRKTTSETVRAVLDSLSEKKKSSP

SEQ ID NO: 26 - protein, 354 aa, Artificial Sequence
  Synthesized
MNTKYNKEFLLYLAGFVDGDGSIYASIRPQQSAKFKHNLQLYFNVGQKTQRRWFLDKLVDEIGVGRVYDHGSVSEYRLSEIKPLHNFLTQLQPFLKLKQKQANLVLKIIEQLPSAKESPDKFLEVCTWVDQIAALNDSKTRKTTSETVRAVLDSLPGSVGGLSPSQASSAASSASSSPGSGISEALRAGAGSGTGYNKEFLLYLAGFVDGDGSIYASIKPNQTLKFKHALSLEFRVAQKTQRRWFLDKLVDEIGVGHVYDFGSVSEYRLSEIKPLHNFLTQLQPFLKLKQKQANLVLKIIEQLPSAKESPDKFLEVCTWVDQIAALNDSKTRKTTSETVRAVLDSLSEKKKSSP

SEQ ID NO: 27 - protein, 354 aa, Artificial Sequence; identical to SEQ ID NO: 17
  Synthesized

SEQ ID NO: 28 - protein, 354 aa, Artificial Sequence
  Synthesized
MNTKYNKEFLLYLAGFVDGDGSIYASIRPQQSAKFKHNLQLYFNVGQKTQRRWFLDKLVDEIGVGKVYDHGSVSEYRLSEIKPLHNFLTQLQPFLKLKQKQANLVLKIIEQLPSAKESPDKFLEVCTWVDQIAALNDSKTRKTTSETVRAVLDSLPGSVGGLSPSQASSAASSASSSPGSGISEALRAGAGSGTGYNKEFLLYLAGFVDGDGSIYASIKPNQTLKFKHALSLEFRVAQKTQRRWFLDKLVDEIGVGHVYDFGSVSEYRLSQIKPLHNFLTQLQPFLKLKQKQANLVLKIIEQLPSAKESPDKFLEVCTWVDQIAALNDSKTRKTTSETVRAVLDSLSEKKKSSP

SEQ ID NO: 29 - protein, 354 aa, Artificial Sequence
  Synthesized
MNTKYNKEFLLYLAGFVDGDGSIYASIRPQQSAKFKHNLQLYFNVGQKTQRRWFLDKLVDEIGVGRVYDHGSVSEYRLSEIKPLHNFLTQLQPFLKLKQKQANLVLKIIEQLPSAKESPDKFLEVCTWVDQIAALNDSKTRKTTSETVRAVLDSLPGSVGGLSPSQASSAASSASSSPGSGISEALRAGAGSGTGYNKEFLLYLAGFVDGDGSIYASIKPNQTLKFKHALSLEFRVAQKTQRRWFLDKLVDEIGVGHVYDFGSVSEYRLSQIKPLHNFLTQLQPFLKLKQKQANLVLKIIEQLPSAKESPDKFLEVCTWVDQIAALNDSKTRKTTSETVRAVLDSLSEKKKSSP

SEQ ID NO: 30 - protein, 354 aa, Artificial Sequence
  Synthesized
MNTKYNKEFLLYLAGFVDGDGSIYASIIPKQGMKFKHALSLGFSVAQKTQRRWFLDKLVDEIGVGYVRDAGSVSEYRLSEIKPLHNFLTQLQPFLKLKQKQANLVLKIIEQLPSAKESPDKFLEVCTWVDQIAALNDSKTRKTTSETVRAVLDSLPGSVGGLSPSQASSAASSASSSPGSGISEALRAGAGSGTGYNKEFLLYLAGFVDGDGSIYAQISPQQGCKFKHYLRLSFRVSQKTQRRWFLDKLVDEIGVGYVYDYGSVSDYQLSEIKPLHNFLTQLQPFLKLKQKQANLVLKIIEQLPSAKESPDKFLEVCTWVDQIAALNDSKTRKTTSETVRAVLDSLSEKKKSSP

SEQ ID NO: 31 - protein, 354 aa, Artificial Sequence
  Synthesized
MNTKYNKEFLLYLAGFVDGDGSIYACICPLQRSKFKHTLQLRFEVGQKTQRRWFLDKLVDEIGVGYVYDSGSVSRYILSQIKPLHNFLTQLQPFLKLKQKQANLVLKIIEQLPSAKESPDKFLEVCTWVDQIAALNDSKTRKTTSETVRAVLDSLPGSVGGLSPSQASSAASSASSSPGSGISEALRAGAGSGTGYNKEFLLYLAGFVDGDGSIFASIKPNQTLKFKHALSLEFRVAQKTQRRWFLDKLVDEIGVGHVYDFGSVSEYRLSEIKPLHNFLTQLQPFLKLKQKQANLVLKIIEQLPSAKESPDKFLEVCTWVDQIAALNDSKTRKTTSETVRAVLDSLSEKKKSSP

SEQ ID NO: 32 - protein, 354 aa, Artificial Sequence
  Synthesized
MNTKYNKEFLLYLAGFVDGDGSIYASITPRQRGKFKHTLNLVFSVGQKTQRRWFLDKLVDEIGVGYVVDHGSVSEYRLSEIKPLHNFLTQLQPFLKLKQKQANLVLKIIEQLPSAKESPDKFLEVCTWVDQIAALNDSKTRKTTSETVRAVLDSLPGSVGGLSPSQASSAASSASSSPGSGISEALRAGAGSGTGYNKEFLLYLAGFVDGDGSIYASIKPMQCLKFKHQLLLSFKVSQKTQRRWFLDKLVDEIGVGYVYDYGSVSEYVLSEIKPLHNFLTQLQPFLKLKQKQANLVLKIIEQLPSAKESPDKFLEVCTWVDQIAALNDSKTRKTTSETVRAVLDSLSEKKKSSP

SEQ ID NO: 33 - protein, 354 aa, Artificial Sequence
  Synthesized
MNTKYNKEFLLYLAGFVDGDGSIYATINPVQKAKFKHGLDLKFAVGQKTQRRWFLDKLVDEIGVGYVIDHGSVSEYRLSEIKPLHNFLTQLQPFLKLKQKQANLVLKIIEQLPSAKESPDKFLEVCTWVDQIAALNDSKTRKTTSETVRAVLDSLPGSVGGLSPSQASSAASSASSSPGSGISEALRAGAGSGTGYNKEFLLYLAGFVDGDGSIFASIKPNQTLKFKHALSLEFRVAQKTQRRWFLDKLVDEIGVGHVYDFGSVSEYRLSQIKPLHNFLTQLQPFLKLKQKQANLVLKIIEQLPSAKESPDKFLEVCTWVDQIAALNDSKTRKTTSETVRAVLDSLSEKKKSSP

SEQ ID NO: 34 - protein, 354 aa, Artificial Sequence
  Synthesized
MNTKYNKEFLLYLAGFVDGDGSIYATIDPRQRCKFKHSLSLRFEVGQKTQRRWFLDKLVDEIGVGYVYDFGSVSRYILSQIKPLHNFLTQLQPFLKLKQKQANLVLKIIEQLPSAKESPDKFLEVCTWVDQIAALNDSKTRKTTSETVRAVLDSLPGSVGGLSPSQASSAASSASSSPGSGISEALRAGAGSGTGYNKEFLLYLAGFVDGDGSIFASIKPNQTLKFKHALSLEFRVAQKTQRRWFLDKLVDEIGVGHVYDFGSVSEYRLSEIKPLHNFLTQLQPFLKLKQKQANLVLKIIEQLPSAKESPDKFLEVCTWVDQIAALNDSKTRKTTSETVRAVLDSLSEKKKSSP

SEQ ID NO: 35 - protein, 354 aa, Artificial Sequence
  Synthesized
MNTKYNKEFLLYLAGFVDGDGSIYATITPRQPSKFKHSLDLRFEVGQKTQRRWFLDKLVDEIGVGYVYDLGSVSIYRLSEIKPLHNFLTQLQPFLKLKQKQANLVLKIIEQLPSAKESPDKFLEVCTWVDQIAALNDSKTRKTTSETVRAVLDSLPGSVGGLSPSQASSAASSASSSPGSGISEALRAGAGSGTGYNKEFLLYLAGFVDGDGSIFASIKPNQTLKFKHALSLEFRVAQKTQRRWFLDKLVDEIGVGHVYDFGSVSEYRLSQIKPLHNFLTQLQPFLKLKQKQANLVLKIIEQLPSAKESPDKFLEVCTWVDQIAALNDSKTRKTTSETVRAVLDSLSEKKKSSP

SEQ ID NO: 36 - protein, 354 aa, Artificial Sequence; identical to SEQ ID NO: 34
  Synthesized

SEQ ID NO: 37 - protein, 354 aa, Artificial Sequence
  Synthesized
MNTKYNKEFLLYLAGFVDGDGSIYASIFPKQHCKFKHALQLYFNVGQKTQRRWFLDKLVDEIGVGYVYDHGSVSEYRLSEIKPLHNFLTQLQPFLKLKQKQANLVLKIIEQLPSAKESPDKFLEVCTWVDQIAALNDSKTRKTTSETVRAVLDSLPGSVGGLSPSQASSAASSASSSPGSGISEALRAGAGSGTGYNKEFLLYLAGFVDGDGSIYASIKPNQTLKFKHALSLEFRVAQKTQRRWFLDKLVDEIGVGHVYDFGSVSEYRLSEIKPLHNFLTQLQPFLKLKQKQANLVLKIIEQLPSAKESPDKFLEVCTWVDQIAALNDSKTRKTTSETVRAVLDSLSEKKKSSP

SEQ ID NO: 38 - protein, 354 aa, Artificial Sequence
  Synthesized
MNTKYNKEFLLYLAGFVDGDGSIYASIQPRQNMKFKHSLQLYFNVGQKTQRRWFLDKLVDEIGVGYVYDHGSVSEYRLSEIKPLHNFLTQLQPFLKLKQKQANLVLKIIEQLPSAKESPDKFLEVCTWVDQIAALNDSKTRKTTSETVRAVLDSLPGSVGGLSPSQASSAASSASSSPGSGISEALRAGAGSGTGYNKEFLLYLAGFVDGDGSIYASIKPNQTLKFKHALSLEFRVAQKTQRRWFLDKLVDEIGVGHVYDFGSVSEYRLSEIKPLHNFLTQLQPFLKLKQKQANLVLKIIEQLPSAKESPDKFLEVCTWVDQIAALNDSKTRKTTSETVRAVLDSLSEKKKSSP

SEQ ID NO: 39 - protein, 354 aa, Artificial Sequence
  Synthesized
MNTKYNKEFLLYLAGFVDGDGSIYASIQPRQHAKFKHSLQLYFNVGQKTQRRWFLDKLVDEIGVGYVYDHGSVSEYRLSEIKPLHNFLTQLQPFLKLKQKQANLVLKIIEQLPSAKESPDKFLEVCTWVDQIAALNDSKTRKTTSETVRAVLDSLPGSVGGLSPSQASSAASSASSSPGSGISEALRAGAGSGTGYNKEFLLYLAGFVDGDGSIYASIKPNQTLKFKHALSLEFRVAQKTQRRWFLDKLVDEIGVGHVYDFGSVSEYRLSEIKPLHNFLTQLQPFLKLKQKQANLVLKIIEQLPSAKESPDKFLEVCTWVDQIAALNDSKTRKTTSETVRAVLDSLSEKKKSSP

SEQ ID NO: 40 - protein, 354 aa, Artificial Sequence
  Synthesized
MNTKYNKEFLLYLAGFVDGDGSIYASIQPRQAAKFKHSLQLYFNVGQKTQRRWFLDKLVDEIGVGYVYDHGSVSEYRLSEIKPLHNFLTQLQPFLKLKQKQANLVLKIIEQLPSAKESPDKFLEVCTWVDQIAALNDSKTRKTTSETVRAVLDSLPGSVGGLSPSQASSAASSASSSPGSGISEALRAGAGSGTGYNKEFLLYLAGFVDGDGSIYASIKPNQTLKFKHALSLEFRVAQKTQRRWFLDKLVDEIGVGHVYDFGSVSEYRLSEIKPLHNFLTQLQPFLKLKQKQANLVLKIIEQLPSAKESPDKFLEVCTWVDQIAALNDSKTRKTTSETVRAVLDSLSEKKKSSP

SEQ ID NO: 41 - protein, 354 aa, Artificial Sequence
  Synthesized
MNTKYNKEFLLYLAGFVDGDGSIYASISPRQAMKFKHSLQLYFNVGQKTQRRWFLDKLVDEIGVGYVYDHGSVSEYRLSEIKPLHNFLTQLQPFLKLKQKQANLVLKIIEQLPSAKESPDKFLEVCTWVDQIAALNDSKTRKTTSETVRAVLDSLPGSVGGLSPSQASSAASSASSSPGSGISEALRAGAGSGTGYNKEFLLYLAGFVDGDGSIYASIKPNQTLKFKHALSLEFRVAQKTQRRWFLDKLVDEIGVGHVYDFGSVSEYRLSEIKPLHNFLTQLQPFLKLKQKQANLVLKIIEQLPSAKESPDKFLEVCTWVDQIAALNDSKTRKTTSETVRAVLDSLSEKKKSSP

SEQ ID NO: 42 - protein, 354 aa, Artificial Sequence
  Synthesized
MNTKYNKEFLLYLAGFVDGDGSIYASIQPRQLAKFKHSLQLYFNVGQKTQRRWFLDKLVDEIGVGYVYDHGSVSEYRLSEIKPLHNFLTQLQPFLKLKQKQANLVLKIIEQLPSAKESPDKFLEVCTWVDQIAALNDSKTRKTTSETVRAVLDSLPGSVGGLSPSQASSAASSASSSPGSGISEALRAGAGSGTGYNKEFLLYLAGFVDGDGSIYASIKPNQTLKFKHALSLEFRVAQKTQRRWFLDKLVDEIGVGHVYDFGSVSEYRLSEIKPLHNFLTQLQPFLKLKQKQANLVLKIIEQLPSAKESPDKFLEVCTWVDQIAALNDSKTRKTTSETVRAVLDSLSEKKKSSP

SEQ ID NO: 43 - protein, 354 aa, Artificial Sequence
  Synthesized
MNTKYNKEFLLYLAGFVDGDGSIYASIVPKQRMKFKHALYLRFNVGQKTQRRWFLDKLVDEIGVGYVYDHGSVSEYRLSEIKPLHNFLTQLQPFLKLKQKQANLVLKIIEQLPSAKESPDKFLEVCTWVDQIAALNDSKTRKTTSETVRAVLDSLPGSVGGLSPSQASSAASSASSSPGSGISEALRAGAGSGTGYNKEFLLYLAGFVDGDGSIYASIKPNQTLKFKHALSLEFRVAQKTQRRWFLDKLVDEIGVGHVYDFGSVSEYRLSEIKPLHNFLTQLQPFLKLKQKQANLVLKIIEQLPSAKESPDKFLEVCTWVDQIAALNDSKTRKTTSETVRAVLDSLSEKKKSSP

SEQ ID NO: 44 - protein, 354 aa, Artificial Sequence
  Synthesized
MNTKYNKEFLLYLAGFVDGDGSIYASITPRQSMKFKHSLQLYFNVGQKTQRRWFLDKLVDEIGVGYVYDHGSVSEYRLSEIKPLHNFLTQLQPFLKLKQKQANLVLKIIEQLPSAKESPDKFLEVCTWVDQIAALNDSKTRKTTSETVRAVLDSLPGSVGGLSPSQASSAASSASSSPGSGISEALRAGAGSGTGYNKEFLLYLAGFVDGDGSIYASIKPNQTLKFKHALSLEFRVAQKTQRRWFLDKLVDEIGVGHVYDFGSVSEYRLSEIKPLHNFLTQLQPFLKLKQKQANLVLKIIEQLPSAKESPDKFLEVCTWVDQIAALNDSKTRKTTSETVRAVLDSLSEKKKSSP

SEQ ID NO: 45 - protein, 354 aa, Artificial Sequence
  Synthesized
MNTKYNKEFLLYLAGFVDGDGSIYASIVPNQRSKFKHFLILAFNVGQKTQRRWFLDKLVDEIGVGYVYDHGSVSEYRLSEIKPLHNFLTQLQPFLKLKQKQANLVLKIIEQLPSAKESPDKFLEVCTWVDQIAALNDSKTRKTTSETVRAVLDSLPGSVGGLSPSQASSAASSASSSPGSGISEALRAGAGSGTGYNKEFLLYLAGFVDGDGSIYASIKPNQTLKFKHALSLEFRVAQKTQRRWFLDKLVDEIGVGHVYDFGSVSEYRLSEIKPLHNFLTQLQPFLKLKQKQANLVLKIIEQLPSAKESPDKFLEVCTWVDQIAALNDSKTRKTTSETVRAVLDSLSEKKKSSP

SEQ ID NO: 46 - protein, 354 aa, Artificial Sequence
  Synthesized
MNTKYNKEFLLYLAGFVDGDGSIYASITPRQTMKFKHSLQLYFNVGQKTQRRWFLDKLVDEIGVGYVYDHGSVSEYRLSEIKPLHNFLTQLQPFLKLKQKQANLVLKIIEQLPSAKESPDKFLEVCTWVDQIAALNDSKTRKTTSETVRAVLDSLPGSVGGLSPSQASSAASSASSSPGSGISEALRAGAGSGTGYNKEFLLYLAGFVDGDGSIYASIKPNQTLKFKHALSLEFRVAQKTQRRWFLDKLVDEIGVGHVYDFGSVSEYRLSEIKPLHNFLTQLQPFLKLKQKQANLVLKIIEQLPSAKESPDKFLEVCTWVDQIAALNDSKTRKTTSETVRAVLDSLSEKKKSSP

SEQ ID NO: 47 - protein, 354 aa, Artificial Sequence
  Synthesized
MNTKYNKEFLLYLAGFVDGDGSIYASIQPRQLSKFKHSLQLYFNVGQKTQRRWFLDKLVDEIGVGYVYDHGSVSEYRLSEIKPLHNFLTQLQPFLKLKQKQANLVLKIIEQLPSAKESPDKFLEVCTWVDQIAALNDSKTRKTTSETVRAVLDSLPGSVGGLSPSQASSAASSASSSPGSGISEALRAGAGSGTGYNKEFLLYLAGFVDGDGSIYASIKPNQTLKFKHALSLEFRVAQKTQRRWFLDKLVDEIGVGHVYDFGSVSEYRLSEIKPLHNFLTQLQPFLKLKQKQANLVLKIIEQLPSAKESPDKFLEVCTWVDQIAALNDSKTRKTTSETVRAVLDSLSEKKKSSP

SEQ ID NO: 48 - protein, 354 aa, Artificial Sequence
  Synthesized
MNTKYNKEFLLYLAGFVDGDGSIYASIQPRQRSKFKHTLQLYFNVGQKTQRRWFLDKLVDEIGVGYVYDHGSVSEYRLSEIKPLHNFLTQLQPFLKLKQKQANLVLKIIEQLPSAKESPDKFLEVCTWVDQIAALNDSKTRKTTSETVRAVLDSLPGSVGGLSPSQASSAASSASSSPGSGISEALRAGAGSGTGYNKEFLLYLAGFVDGDGSIYASIKPNQTLKFKHALSLEFRVAQKTQRRWFLDKLVDEIGVGHVYDFGSVSEYRLSEIKPLHNFLTQLQPFLKLKQKQANLVLKIIEQLPSAKESPDKFLEVCTWVDQIAALNDSKTRKTTSETVRAVLDSLSEKKKSSP

SEQ ID NO: 49 - protein, 354 aa, Artificial Sequence; identical to SEQ ID NO: 40
  Synthesized

SEQ ID NO: 50 - protein, 354 aa, Artificial Sequence
  Synthesized
MNTKYNKEFLLYLAGFVDGDGSIYASIQPRQPAKFKHSLQLYFNVGQKTQRRWFLDKLVDEIGVGYVYDHGSVSEYRLSEIKPLHNFLTQLQPFLKLKQKQANLVLKIIEQLPSAKESPDKFLEVCTWVDQIAALNDSKTRKTTSETVRAVLDSLPGSVGGLSPSQASSAASSASSSPGSGISEALRAGAGSGTGYNKEFLLYLAGFVDGDGSIYASIKPNQTLKFKHALSLEFRVAQKTQRRWFLDKLVDEIGVGHVYDFGSVSEYRLSEIKPLHNFLTQLQPFLKLKQKQANLVLKIIEQLPSAKESPDKFLEVCTWVDQIAALNDSKTRKTTSETVRAVLDSLSEKKKSSP

SEQ ID NO: 51 - protein, 354 aa, Artificial Sequence
  Synthesized
MNTKYNKEFLLYLAGFVDGDGSIYASINPRQNSKFKHFLQLYFNVGQKTQRRWFLDKLVDEIGVGYVYDHGSVSEYRLSEIKPLHNFLTQLQPFLKLKQKQANLVLKIIEQLPSAKESPDKFLEVCTWVDQIAALNDSKTRKTTSETVRAVLDSLPGSVGGLSPSQASSAASSASSSPGSGISEALRAGAGSGTGYNKEFLLYLAGFVDGDGSIYASIKPNQTLKFKHALSLEFRVAQKTQRRWFLDKLVDEIGVGHVYDFGSVSEYRLSEIKPLHNFLTQLQPFLKLKQKQANLVLKIIEQLPSAKESPDKFLEVCTWVDQIAALNDSKTRKTTSETVRAVLDSLSEKKKSSP

SEQ ID NO: 52 - protein, 354 aa, Artificial Sequence
  Synthesized
MNTKYNKEFLLYLAGFVDGDGSIYASINPKQGCKFKHALQLYFNVGQKTQRRWFLDKLVDEIGVGYVYDHGSVSEYRLSEIKPLHNFLTQLQPFLKLKQKQANLVLKIIEQLPSAKESPDKFLEVCTWVDQIAALNDSKTRKTTSETVRAVLDSLPGSVGGLSPSQASSAASSASSSPGSGISEALRAGAGSGTGYNKEFLLYLAGFVDGDGSIYASIKPNQTLKFKHALSLEFRVAQKTQRRWFLDKLVDEIGVGHVYDFGSVSEYRLSEIKPLHNFLTQLQPFLKLKQKQANLVLKIIEQLPSAKESPDKFLEVCTWVDQIAALNDSKTRKTTSETVRAVLDSLSEKKKSSP

SEQ ID NO: 53 - protein, 354 aa, Artificial Sequence
  Synthesized
MNTKYNKEFLLYLAGFVDGDGSIYASIQPKQRAKFKHSLQLYFNVGQKTQRRWFLDKLVDEIGVGYVYDHGSVSEYRLSEIKPLHNFLTQLQPFLKLKQKQANLVLKIIEQLPSAKESPDKFLEVCTWVDQIAALNDSKTRKTTSETVRAVLDSLPGSVGGLSPSQASSAASSASSSPGSGISEALRAGAGSGTGYNKEFLLYLAGFVDGDGSIYASIKPNQTLKFKHALSLEFRVAQKTQRRWFLDKLVDEIGVGHVYDFGSVSEYRLSEIKPLHNFLTQLQPFLKLKQKQANLVLKIIEQLPSAKESPDKFLEVCTWVDQIAALNDSKTRKTTSETVRAVLDSLSEKKKSSP

SEQ ID NO: 54 - protein, 354 aa, Artificial Sequence
  Synthesized
MNTKYNKEFLLYLAGFVDGDGSIYASIQPRQCSKFKHSLQLYFNVGQKTQRRWFLDKLVDEIGVGYVYDHGSVSEYRLSEIKPLHNFLTQLQPFLKLKQKQANLVLKIIEQLPSAKESPDKFLEVCTWVDQIAALNDSKTRKTTSETVRAVLDSLPGSVGGLSPSQASSAASSASSSPGSGISEALRAGAGSGTGYNKEFLLYLAGFVDGDGSIYASIKPNQTLKFKHALSLEFRVAQKTQRRWFLDKLVDEIGVGHVYDFGSVSEYRLSEIKPLHNFLTQLQPFLKLKQKQANLVLKIIEQLPSAKESPDKFLEVCTWVDQIAALNDSKTRKTTSETVRAVLDSLSEKKKSSP

SEQ ID NO: 55 - protein, 354 aa, Artificial Sequence
  Synthesized
MNTKYNKEFLLYLAGFVDGDGSIYASIQPRQRAKFKHSLQLYFNVGQKTQRRWFLDKLVDEIGVGYVYDHGSVSEYRLSEIKPLHNFLTQLQPFLKLKQKQANLVLKIIEQLPSAKESPDKFLEVCTWVDQIAALNDSKTRKTTSETVRAVLDSLPGSVGGLSPSQASSAASSASSSPGSGISEALRAGAGSGTGYNKEFLLYLAGFVDGDGSIYASIKPNQTLKFKHALSLEFRVAQKTQRRWFLDKLVDEIGVGHVYDFGSVSEYRLSEIKPLHNFLTQLQPFLKLKQKQANLVLKIIEQLPSAKESPDKFLEVCTWVDQIAALNDSKTRKTTSETVRAVLDSLSEKKKSSP

SEQ ID NO: 56 - protein, 354 aa, Artificial Sequence; identical to SEQ ID NO: 16
  Synthesized

SEQ ID NO: 57 - protein, 354 aa, Artificial Sequence
  Synthesized
MNTKYNKEFLLYLAGFVDGDGSIYASIQPRQRSKFKHSLQLYFNVGQKTQRRWFLDKLVDEIGVGYVYDHGSVSEYRLSEIKPLHNFLTQLQPFLKLKQKQANLVLKIIEQLPSAKESPDKFLEVCTWVDQIAALNDSKTRKTTSETVRAVLDSLPGSVGGLSPSQASSAASSASSSPGSGISEALRAGAGSGTGYNKEFLLYLAGFVDGDGSIYASIKPNQTLKFKHALSLEFRVAQKTQRRWFLDKLVDEIGVGHVYDFGSVSEYRLSEIKPLHNFLTQLQPFLKLKQKQANLVLKIIEQLPSAKESPDKFLEVCTWVDQIAALNDSKTRKTTSETVRAVLDSLSEKKKSSP

SEQ ID NO: 58 - protein, 354 aa, Artificial Sequence
  Synthesized
MNTKYNKEFLLYLAGFVDGDGSIYASIQPRQHSKFKHSLQLYFNVGQKTQRRWFLDKLVDEIGVGYVYDHGSVSEYRLSEIKPLHNFLTQLQPFLKLKQKQANLVLKIIEQLPSAKESPDKFLEVCTWVDQIAALNDSKTRKTTSETVRAVLDSLPGSVGGLSPSQASSAASSASSSPGSGISEALRAGAGSGTGYNKEFLLYLAGFVDGDGSIYATIKPAQALKFKHYLHLEFRVSQKTQRRWFLDKLVDEIGVGHVYDCGSVSEYRLSEIKPLHNFLTQLQPFLKLKQKQANLVLKIIEQLPSAKESPDKFLEVCTWVDQIAALNDSKTRKTTSETVRAVLDSLSEKKKSSP

SEQ ID NO: 59 - protein, 354 aa, Artificial Sequence
  Synthesized
MNTKYNKEFLLYLAGFVDGDGSIYASIQPRQHSKFKHSLQLYFNVGQKTQRRWFLDKLVDEIGVGYVYDHGSVSEYRLSEIKPLHNFLTQLQPFLKLKQKQANLVLKIIEQLPSAKESPDKFLEVCTWVDQIAALNDSKTRKTTSETVRAVLDSLPGSVGGLSPSQASSAASSASSSPGSGISEALRAGAGSGTGYNKEFLLYLAGFVDGDGSIYASIKPSQQLKFKHQLSLEFRVCQKTQRRWFLDKLVDEIGVGHVYDAGSVSEYRLSEIKPLHNFLTQLQPFLKLKQKQANLVLKIIEQLPSAKESPDKFLEVCTWVDQIAALNDSKTRKTTSETVRAVLDSLSEKKKSSP

SEQ ID NO: 60 - protein, 354 aa, Artificial Sequence
  Synthesized
MNTKYNKEFLLYLAGFVDGDGSIYASIQPRQHSKFKHSLQLYFNVGQKTQRRWFLDKLVDEIGVGYVYDHGSVSEYRLSEIKPLHNFLTQLQPFLKLKQKQANLVLKIIEQLPSAKESPDKFLEVCTWVDQIAALNDSKTRKTTSETVRAVLDSLPGSVGGLSPSQASSAASSASSSPGSGISEALRAGAGSGTGYNKEFLLYLAGFVDGDGSIYASIKPGQRLKFKHYLYLEFRVIQKTQRRWFLDKLVDEIGVGHVYDMGSVSEYRLSEIKPLHNFLTQLQPFLKLKQKQANLVLKIIEQLPSAKESPDKFLEVCTWVDQIAALNDSKTRKTTSETVRAVLDSLSEKKKSSP

SEQ ID NO: 61 - protein, 354 aa, Artificial Sequence
  Synthesized
MNTKYNKEFLLYLAGFVDGDGSIYASIQPRQHSKFKHSLQLYFNVGQKTQRRWFLDKLVDEIGVGYVYDHGSVSEYRLSEIKPLHNFLTQLQPFLKLKQKQANLVLKIIEQLPSAKESPDKFLEVCTWVDQIAALNDSKTRKTTSETVRAVLDSLPGSVGGLSPSQASSAASSASSSPGSGISEALRAGAGSGTGYNKEFLLYLAGFVDGDGSIYACIKPSQALKFKHYLVLEFRVFQKTQRRWFLDKLVDEIGVGHVYDNGSVSDYRLSEIKPLHNFLTQLQPFLKLKQKQANLVLKIIEQLPSAKESPDKFLEVCTWVDQIAALNDSKTRKTTSETVRAVLDSLSEKKKSSP

SEQ ID NO: 62 - protein, 354 aa, Artificial Sequence
  Synthesized
MNTKYNKEFLLYLAGFVDGDGSIYASIQPRQHSKFKHSLQLYFNVGQKTQRRWFLDKLVDEIGVGYVYDHGSVSEYRLSEIKPLHNFLTQLQPFLKLKQKQANLVLKIIEQLPSAKESPDKFLEVCTWVDQIAALNDSKTRKTTSETVRAVLDSLPGSVGGLSPSQASSAASSASSSPGSGISEALRAGAGSGTGYNKEFLLYLAGFVDGDGSIYASIKPMQPLKFKHGLTLEFRVSQKTQRRWFLDKLVDEIGVGHVYDFGSVSEYRLSEIKPLHNFLTQLQPFLKLKQKQANLVLKIIEQLPSAKESPDKFLEVCTWVDQIAALNDSKTRKTTSETVRAVLDSLSEKKKSSP

SEQ ID NO: 63 - protein, 354 aa, Artificial Sequence
  Synthesized
MNTKYNKEFLLYLAGFVDGDGSIYASIQPRQHSKFKHSLQLYFNVGQKTQRRWFLDKLVDEIGVGYVYDHGSVSEYRLSEIKPLHNFLTQLQPFLKLKQKQANLVLKIIEQLPSAKESPDKFLEVCTWVDQIAALNDSKTRKTTSETVRAVLDSLPGSVGGLSPSQASSAASSASSSPGSGISEALRAGAGSGTGYNKEFLLYLAGFVDGDGSIYALIKPGQRLKFKHYLHLEFRVTQKTQRRWFLDKLVDEIGVGHVYDSGSVSDYRLSEIKPLHNFLTQLQPFLKLKQKQANLVLKIIEQLPSAKESPDKFLEVCTWVDQIAALNDSKTRKTTSETVRAVLDSLSEKKKSSP

SEQ ID NO: 64 - protein, 354 aa, Artificial Sequence
  Synthesized
MNTKYNKEFLLYLAGFVDGDGSIYASIQPRQHSKFKHSLQLYFNVGQKTQRRWFLDKLVDEIGVGYVYDHGSVSEYRLSEIKPLHNFLTQLQPFLKLKQKQANLVLKIIEQLPSAKESPDKFLEVCTWVDQIAALNDSKTRKTTSETVRAVLDSLPGSVGGLSPSQASSAASSASSSPGSGISEALRAGAGSGTGYNKEFLLYLAGFVDGDGSIYASIKPQQVLKFKHQLHLEFRVSQKTQRRWFLDKLVDEIGVGHVYDAGSVSEYRLSEIKPLHNFLTQLQPFLKLKQKQANLVLKIIEQLPSAKESPDKFLEVCTWVDQIAALNDSKTRKTTSETVRAVLDSLSEKKKSSP

SEQ ID NO: 65 - protein, 354 aa, Artificial Sequence
  Synthesized
MNTKYNKEFLLYLAGFVDGDGSIYASIQPRQHSKFKHSLQLYFNVGQKTQRRWFLDKLVDEIGVGYVYDHGSVSEYRLSEIKPLHNFLTQLQPFLKLKQKQANLVLKIIEQLPSAKESPDKFLEVCTWVDQIAALNDSKTRKTTSETVRAVLDSLPGSVGGLSPSQASSAASSASSSPGSGISEALRAGAGSGTGYNKEFLLYLAGFVDGDGSIYASIKPGQRLKFKHQLFLEFRVTQKTQRRWFLDKLVDEIGVGHVYDNGSVSEYRLSEIKPLHNFLTQLQPFLKLKQKQANLVLKIIEQLPSAKESPDKFLEVCTWVDQIAALNDSKTRKTTSETVRAVLDSLSEKKKSSP

SEQ ID NO: 66 - protein, 354 aa, Artificial Sequence
  Synthesized
MNTKYNKEFLLYLAGFVDGDGSIYASIQPRQHSKFKHSLQLYFNVGQKTQRRWFLDKLVDEIGVGYVYDHGSVSEYRLSEIKPLHNFLTQLQPFLKLKQKQANLVLKIIEQLPSAKESPDKFLEVCTWVDQIAALNDSKTRKTTSETVRAVLDSLPGSVGGLSPSQASSAASSASSSPGSGISEALRAGAGSGTGYNKEFLLYLAGFVDGDGSIYASIKPYQTLKFKHYLFLEFRVYQKTQRRWFLDKLVDEIGVGHVYDTGSVSEYRLSEIKPLHNFLTQLQPFLKLKQKQANLVLKIIEQLPSAKESPDKFLEVCTWVDQIAALNDSKTRKTTSETVRAVLDSLSEKKKSSP

SEQ ID NO: 67 - protein, 354 aa, Artificial Sequence
  Synthesized
MNTKYNKEFLLYLAGFVDGDGSIYASIQPRQHSKFKHSLQLYFNVGQKTQRRWFLDKLVDEIGVGYVYDHGSVSEYRLSEIKPLHNFLTQLQPFLKLKQKQANLVLKIIEQLPSAKESPDKFLEVCTWVDQIAALNDSKTRKTTSETVRAVLDSLPGSVGGLSPSQASSAASSASSSPGSGISEALRAGAGSGTGYNKEFLLYLAGFVDGDGSIYASIKPSQALKFKHSLALEFRVFQKTQRRWFLDKLVDEIGVGHVYDTGSVSDYRLSEIKPLHNFLTQLQPFLKLKQKQANLVLKIIEQLPSAKESPDKFLEVCTWVDQIAALNDSKTRKTTSETVRAVLDSLSEKKKSSP

SEQ ID NO: 68 - protein, 354 aa, Artificial Sequence
  Synthesized
MNTKYNKEFLLYLAGFVDGDGSIYASIQPRQHSKFKHSLQLYFNVGQKTQRRWFLDKLVDEIGVGYVYDHGSVSEYRLSEIKPLHNFLTQLQPFLKLKQKQANLVLKIIEQLPSAKESPDKFLEVCTWVDQIAALNDSKTRKTTSETVRAVLDSLPGSVGGLSPSQASSAASSASSSPGSGISEALRAGAGSGTGYNKEFLLYLAGFVDGDGSIYAIIKPCQALKFKHTLQLEFRVSQKTQRRWFLDKLVDEIGVGHVYDFGSVSEYRLSEIKPLHNFLTQLQPFLKLKQKQANLVLKIIEQLPSAKESPDKFLEVCTWVDQIAALNDSKTRKTTSETVRAVLDSLSEKKKSSP

SEQ ID NO: 69 - protein, 354 aa, Artificial Sequence
  Synthesized
MNTKYNKEFLLYLAGFVDGDGSIYASIQPRQHSKFKHSLQLYFNVGQKTQRRWFLDKLVDEIGVGYVYDHGSVSEYRLSEIKPLHNFLTQLQPFLKLKQKQANLVLKIIEQLPSAKESPDKFLEVCTWVDQIAALNDSKTRKTTSETVRAVLDSLPGSVGGLSPSQASSAASSASSSPGSGISEALRAGAGSGTGYNKEFLLYLAGFVDGDGSIYASIKPRQDLKFKHCLFLEFRVSQKTQRRWFLDKLVDEIGVGHVYDTGSVSDYRLSEIKPLHNFLTQLQPFLKLKQKQANLVLKIIEQLPSAKESPDKFLEVCTWVDQIAALNDSKTRKTTSETVRAVLDSLSEKKKSSP

SEQ ID NO: 70 - protein, 354 aa, Artificial Sequence
  Synthesized
MNTKYNKEFLLYLAGFVDGDGSIYASIQPRQHSKFKHSLQLYFNVGQKTQRRWFLDKLVDEIGVGYVYDHGSVSEYRLSEIKPLHNFLTQLQPFLKLKQKQANLVLKIIEQLPSAKESPDKFLEVCTWVDQIAALNDSKTRKTTSETVRAVLDSLPGSVGGLSPSQASSAASSASSSPGSGISEALRAGAGSGTGYNKEFLLYLAGFVDGDGSIYACIKPDQCLKFKHYLSLEFRVFQKTQRRWFLDKLVDEIGVGHVYDNGSVSDYRLSEIKPLHNFLTQLQPFLKLKQKQANLVLKIIEQLPSAKESPDKFLEVCTWVDQIAALNDSKTRKTTSETVRAVLDSLSEKKKSSP

SEQ ID NO: 71 - protein, 354 aa, Artificial Sequence
  Synthesized
MNTKYNKEFLLYLAGFVDGDGSIYASIQPRQHSKFKHSLQLYFNVGQKTQRRWFLDKLVDEIGVGYVYDHGSVSEYRLSEIKPLHNFLTQLQPFLKLKQKQANLVLKIIEQLPSAKESPDKFLEVCTWVDQIAALNDSKTRKTTSETVRAVLDSLPGSVGGLSPSQASSAASSASSSPGSGISEALRAGAGSGTGYNKEFLLYLAGFVDGDGSIYASIKPHQGLKFKHQLALEFRVSQKTQRRWFLDKLVDEIGVGHVYDHGSVSDYRLSEIKPLHNFLTQLQPFLKLKQKQANLVLKIIEQLPSAKESPDKFLEVCTWVDQIAALNDSKTRKTTSETVRAVLDSLSEKKKSSP

SEQ ID NO: 72 - protein, 354 aa, Artificial Sequence
  Synthesized
MNTKYNKEFLLYLAGFVDGDGSIYASIQPRQHSKFKHSLQLYFNVGQKTQRRWFLDKLVDEIGVGYVYDHGSVSEYRLSEIKPLHNFLTQLQPFLKLKQKQANLVLKIIEQLPSAKESPDKFLEVCTWVDQIAALNDSKTRKTTSETVRAVLDSLPGSVGGLSPSQASSAASSASSSPGSGISEALRAGAGSGTGYNKEFLLYLAGFVDGDGSIYAVIKPSQHLKFKHYLTLEFRVSQKTQRRWFLDKLVDEIGVGHVYDMGSVSEYRLSEIKPLHNFLTQLQPFLKLKQKQANLVLKIIEQLPSAKESPDKFLEVCTWVDQIAALNDSKTRKTTSETVRAVLDSLSEKKKSSP

SEQ ID NO: 73 - protein, 354 aa, Artificial Sequence
  Synthesized
MNTKYNKEFLLYLAGFVDGDGSIYASIQPRQHSKFKHSLQLYFNVGQKTQRRWFLDKLVDEIGVGYVYDHGSVSEYRLSEIKPLHNFLTQLQPFLKLKQKQANLVLKIIEQLPSAKESPDKFLEVCTWVDQIAALNDSKTRKTTSETVRAVLDSLPGSVGGLSPSQASSAASSASSSPGSGISEALRAGAGSGTGYNKEFLLYLAGFVDGDGSIYASIKPRQRLKFKHQLFLEFRVTQKTQRRWFLDKLVDEIGVGHVYDHGSVSEYRLSEIKPLHNFLTQLQPFLKLKQKQANLVLKIIEQLPSAKESPDKFLEVCTWVDQIAALNDSKTRKTTSETVRAVLDSLSEKKKSSP

SEQ ID NO: 74 - protein, 354 aa, Artificial Sequence
  Synthesized
MNTKYNKEFLLYLAGFVDGDGSIYASIQPRQHSKFKHSLQLYFNVGQKTQRRWFLDKLVDEIGVGYVYDHGSVSEYRLSEIKPLHNFLTQLQPFLKLKQKQANLVLKIIEQLPSAKESPDKFLEVCTWVDQIAALNDSKTRKTTSETVRAVLDSLPGSVGGLSPSQASSAASSASSSPGSGISEALRAGAGSGTGYNKEFLLYLAGFVDGDGSIYATIKPRQNLKFKHQLLLEFRVSQKTQRRWFLDKLVDEIGVGHVYDIGSVSEYRLSEIKPLHNFLTQLQPFLKLKQKQANLVLKIIEQLPSAKESPDKFLEVCTWVDQIAALNDSKTRKTTSETVRAVLDSLSEKKKSSP

SEQ ID NO: 75 - protein, 354 aa, Artificial Sequence
  Synthesized
MNTKYNKEFLLYLAGFVDGDGSIYASIQPRQHSKFKHSLQLYFNVGQKTQRRWFLDKLVDEIGVGYVYDHGSVSEYRLSEIKPLHNFLTQLQPFLKLKQKQANLVLKIIEQLPSAKESPDKFLEVCTWVDQIAALNDSKTRKTTSETVRAVLDSLPGSVGGLSPSQASSAASSASSSPGSGISEALRAGAGSGTGYNKEFLLYLAGFVDGDGSIYAMIKPGQSLKFKHYLSLEFRVVQKTQRRWFLDKLVDEIGVGHVYDAGSVSYYRLSEIKPLHNFLTQLQPFLKLKQKQANLVLKIIEQLPSAKESPDKFLEVCTWVDQIAALNDSKTRKTTSETVRAVLDSLSEKKKSSP

SEQ ID NO: 76 - protein, 354 aa, Artificial Sequence
  Synthesized
MNTKYNKEFLLYLAGFVDGDGSIYASIQPRQHSKFKHSLQLYFNVGQKTQRRWFLDKLVDEIGVGYVYDHGSVSEYRLSEIKPLHNFLTQLQPFLKLKQKQANLVLKIIEQLPSAKESPDKFLEVCTWVDQIAALNDSKTRKTTSETVRAVLDSLPGSVGGLSPSQASSAASSASSSPGSGISEALRAGAGSGTGYNKEFLLYLAGFVDGDGSIYATIKPQQTLKFKHSLRLEFRVHQKTQRRWFLDKLVDEIGVGHVYDAGSVSDYRLSEIKPLHNFLTQLQPFLKLKQKQANLVLKIIEQLPSAKESPDKFLEVCTWVDQIAALNDSKTRKTTSETVRAVLDSLSEKKKSSP

SEQ ID NO: 77 - protein, 354 aa, Artificial Sequence
  Synthesized
MNTKYNKEFLLYLAGFVDGDGSIYASIQPRQAAKFKHTLQLYFNVGQKTQRRWFLDKLVDEIGVGYVYDHGSVSEYRLSEIKPLHNFLTQLQPFLKLKQKQANLVLKIIEQLPSAKESPDKFLEVCTWVDQIAALNDSKTRKTTSETVRAVLDSLPGSVGGLSPSQASSAASSASSSPGSGISEALRAGAGSGTGYNKEFLLYLAGFVDGDGSIYATIKPRQRLKFKHYLFLEFRVTQKTQRRWFLDKLVDEIGVGHVYDHGSVSDYRLSEIKPLHNFLTQLQPFLKLKQKQANLVLKIIEQLPSAKESPDKFLEVCTWVDQIAALNDSKTRKTTSETVRAVLDSLSEKKKSSP

SEQ ID NO: 78 - protein, 354 aa, Artificial Sequence
  Synthesized
MNTKYNKEFLLYLAGFVDGDGSIYASIQPRQAAKFKHTLQLYFNVGQKTQRRWFLDKLVDEIGVGYVYDHGSVSEYRLSEIKPLHNFLTQLQPFLKLKQKQANLVLKIIEQLPSAKESPDKFLEVCTWVDQIAALNDSKTRKTTSETVRAVLDSLPGSVGGLSPSQASSAASSASSSPGSGISEALRAGAGSGTGYNKEFLLYLAGFVDGDGSIYASIKPGQNLKFKHNLFLEFRVSQKTQRRWFLDKLVDEIGVGHVYDAGSVSDYRLSEIKPLHNFLTQLQPFLKLKQKQANLVLKIIEQLPSAKESPDKFLEVCTWVDQIAALNDSKTRKTTSETVRAVLDSLSEKKKSSP

SEQ ID NO: 79 - protein, 354 aa, Artificial Sequence
  Synthesized
MNTKYNKEFLLYLAGFVDGDGSIYASIQPRQAAKFKHTLQLYFNVGQKTQRRWFLDKLVDEIGVGYVYDHGSVSEYRLSEIKPLHNFLTQLQPFLKLKQKQANLVLKIIEQLPSAKESPDKFLEVCTWVDQIAALNDSKTRKTTSETVRAVLDSLPGSVGGLSPSQASSAASSASSSPGSGISEALRAGAGSGTGYNKEFLLYLAGFVDGDGSIYAQIKPGQYLKFKHQLFLEFRVTQKTQRRWFLDKLVDEIGVGHVYDQGSVSDYRLSEIKPLHNFLTQLQPFLKLKQKQANLVLKIIEQLPSAKESPDKFLEVCTWVDQIAALNDSKTRKTTSETVRAVLDSLSEKKKSSP

SEQ ID NO: 80 - protein, 354 aa, Artificial Sequence
  Synthesized
MNTKYNKEFLLYLAGFVDGDGSIYASIQPRQAAKFKHTLQLYFNVGQKTQRRWFLDKLVDEIGVGYVYDHGSVSEYRLSEIKPLHNFLTQLQPFLKLKQKQANLVLKIIEQLPSAKESPDKFLEVCTWVDQIAALNDSKTRKTTSETVRAVLDSLPGSVGGLSPSQASSAASSASSSPGSGISEALRAGAGSGTGYNKEFLLYLAGFVDGDGSIYACIKPLQLLKFKHQLRLEFRVYQKTQRRWFLDKLVDEIGVGHVYDNGSVSEYRLSEIKPLHNFLTQLQPFLKLKQKQANLVLKIIEQLPSAKESPDKFLEVCTWVDQIAALNDSKTRKTTSETVRAVLDSLSEKKKSSP

SEQ ID NO: 81 - protein, 354 aa, Artificial Sequence
  Synthesized
MNTKYNKEFLLYLAGFVDGDGSIYASIQPRQAAKFKHTLQLYFNVGQKTQRRWFLDKLVDEIGVGYVYDHGSVSEYRLSEIKPLHNFLTQLQPFLKLKQKQANLVLKIIEQLPSAKESPDKFLEVCTWVDQIAALNDSKTRKTTSETVRAVLDSLPGSVGGLSPSQASSAASSASSSPGSGISEALRAGAGSGTGYNKEFLLYLAGFVDGDGSIYAMIKPAQRLKFKHQLFLEFRVTQKTQRRWFLDKLVDEIGVGHVYDTGSVSDYRLSEIKPLHNFLTQLQPFLKLKQKQANLVLKIIEQLPSAKESPDKFLEVCTWVDQIAALNDSKTRKTTSETVRAVLDSLSEKKKSSP

SEQ ID NO: 82 - protein, 354 aa, Artificial Sequence
  Synthesized
MNTKYNKEFLLYLAGFVDGDGSIYASIQPRQAAKFKHTLQLYFNVGQKTQRRWFLDKLVDEIGVGYVYDHGSVSEYRLSEIKPLHNFLTQLQPFLKLKQKQANLVLKIIEQLPSAKESPDKFLEVCTWVDQIAALNDSKTRKTTSETVRAVLDSLPGSVGGLSPSQASSAASSASSSPGSGISEALRAGAGSGTGYNKEFLLYLAGFVDGDGSIYAGIKPRQELKFKHCLNLEFRVSQKTQRRWFLDKLVDEIGVGHVYDSGSVSEYRLSEIKPLHNFLTQLQPFLKLKQKQANLVLKIIEQLPSAKESPDKFLEVCTWVDQIAALNDSKTRKTTSETVRAVLDSLSEKKKSSP

SEQ ID NO: 83 - protein, 354 aa, Artificial Sequence
  Synthesized
MNTKYNKEFLLYLAGFVDGDGSIYASIQPRQAAKFKHTLQLYFNVGQKTQRRWFLDKLVDEIGVGYVYDHGSVSEYRLSEIKPLHNFLTQLQPFLKLKQKQANLVLKIIEQLPSAKESPDKFLEVCTWVDQIAALNDSKTRKTTSETVRAVLDSLPGSVGGLSPSQASSAASSASSSPGSGISEALRAGAGSGTGYNKEFLLYLAGFVDGDGSIYASIKPQQGLKFKHQLSLEFRVYQKTQRRWFLDKLVDEIGVGHVYDTGSVSEYRLSEIKPLHNFLTQLQPFLKLKQKQANLVLKIIEQLPSAKESPDKFLEVCTWVDQIAALNDSKTRKTTSETVRAVLDSLSEKKKSSP

SEQ ID NO: 84 - protein, 354 aa, Artificial Sequence
  Synthesized
MNTKYNKEFLLYLAGFVDGDGSIYASIQPRQAAKFKHTLQLYFNVGQKTQRRWFLDKLVDEIGVGYVYDHGSVSEYRLSEIKPLHNFLTQLQPFLKLKQKQANLVLKIIEQLPSAKESPDKFLEVCTWVDQIAALNDSKTRKTTSETVRAVLDSLPGSVGGLSPSQASSAASSASSSPGSGISEALRAGAGSGTGYNKEFLLYLAGFVDGDGSIYAAIKPQQGLKFKHRLALEFRVSQKTQRRWFLDKLVDEIGVGHVYDAGSVSEYRLSEIKPLHNFLTQLQPFLKLKQKQANLVLKIIEQLPSAKESPDKFLEVCTWVDQIAALNDSKTRKTTSETVRAVLDSLSEKKKSSP

SEQ ID NO: 85 - protein, 354 aa, Artificial Sequence
  Synthesized
MNTKYNKEFLLYLAGFVDGDGSIYASIQPRQAAKFKHTLQLYFNVGQKTQRRWFLDKLVDEIGVGYVYDHGSVSEYRLSEIKPLHNFLTQLQPFLKLKQKQANLVLKIIEQLPSAKESPDKFLEVCTWVDQIAALNDSKTRKTTSETVRAVLDSLPGSVGGLSPSQASSAASSASSSPGSGISEALRAGAGSGTGYNKEFLLYLAGFVDGDGSIYAVIKPQQHLKFKHQLFLEFRVSQKTQRRWFLDKLVDEIGVGHVYDSGSVSEYRLSEIKPLHNFLTQLQPFLKLKQKQANLVLKIIEQLPSAKESPDKFLEVCTWVDQIAALNDSKTRKTTSETVRAVLDSLSEKKKSSP

SEQ ID NO: 86 - protein, 354 aa, Artificial Sequence
  Synthesized
MNTKYNKEFLLYLAGFVDGDGSIYASIQPRQAAKFKHTLQLYFNVGQKTQRRWFLDKLVDEIGVGYVYDHGSVSEYRLSEIKPLHNFLTQLQPFLKLKQKQANLVLKIIEQLPSAKESPDKFLEVCTWVDQIAALNDSKTRKTTSETVRAVLDSLPGSVGGLSPSQASSAASSASSSPGSGISEALRAGAGSGTGYNKEFLLYLAGFVDGDGSIYAKIKPQQSLKFKHYLNLEFRVTQKTQRRWFLDKLVDEIGVGHVYDCGSVSDYRLSEIKPLHNFLTQLQPFLKLKQKQANLVLKIIEQLPSAKESPDKFLEVCTWVDQIAALNDSKTRKTTSETVRAVLDSLSEKKKSSP

SEQ ID NO: 87 - protein, 354 aa, Artificial Sequence
  Synthesized
MNTKYNKEFLLYLAGFVDGDGSIYASIQPRQAAKFKHTLQLYFNVGQKTQRRWFLDKLVDEIGVGYVYDHGSVSEYRLSEIKPLHNFLTQLQPFLKLKQKQANLVLKIIEQLPSAKESPDKFLEVCTWVDQIAALNDSKTRKTTSETVRAVLDSLPGSVGGLSPSQASSAASSASSSPGSGISEALRAGAGSGTGYNKEFLLYLAGFVDGDGSIYAAIKPVQTLKFKHKLFLEFRVYQKTQRRWFLDKLVDEIGVGHVYDSGSVSDYRLSEIKPLHNFLTQLQPFLKLKQKQANLVLKIIEQLPSAKESPDKFLEVCTWVDQIAALNDSKTRKTTSETVRAVLDSLSEKKKSSP

SEQ ID NO: 88 - protein, 354 aa, Artificial Sequence
  Synthesized
MNTKYNKEFLLYLAGFVDGDGSIYASIQPRQAAKFKHTLQLYFNVGQKTQRRWFLDKLVDEIGVGYVYDHGSVSEYRLSEIKPLHNFLTQLQPFLKLKQKQANLVLKIIEQLPSAKESPDKFLEVCTWVDQIAALNDSKTRKTTSETVRAVLDSLPGSVGGLSPSQASSAASSASSSPGSGISEALRAGAGSGTGYNKEFLLYLAGFVDGDGSIYASIKPAQNLKFKHYLHLEFRVYQKTQRRWFLDKLVDEIGVGHVYDTGSVSNYRLSEIKPLHNFLTQLQPFLKLKQKQANLVLKIIEQLPSAKESPDKFLEVCTWVDQIAALNDSKTRKTTSETVRAVLDSLSEKKKSSP

SEQ ID NO: 89 - protein, 354 aa, Artificial Sequence
  Synthesized
MNTKYNKEFLLYLAGFVDGDGSIYASIQPRQAAKFKHTLQLYFNVGQKTQRRWFLDKLVDEIGVGYVYDHGSVSEYRLSEIKPLHNFLTQLQPFLKLKQKQANLVLKIIEQLPSAKESPDKFLEVCTWVDQIAALNDSKTRKTTSETVRAVLDSLPGSVGGLSPSQASSAASSASSSPGSGISEALRAGAGSGTGYNKEFLLYLAGFVDGDGSIYASIKPGQCLKFKHALYLEFRVTQKTQRRWFLDKLVDEIGVGHVYDTGSVSDYRLSEIKPLHNFLTQLQPFLKLKQKQANLVLKIIEQLPSAKESPDKFLEVCTWVDQIAALNDSKTRKTTSETVRAVLDSLSEKKKSSP

SEQ ID NO: 90 - protein, 354 aa, Artificial Sequence
  Synthesized
MNTKYNKEFLLYLAGFVDGDGSIYASIQPRQRSKFKHSLQLYFNVGQKTQRRWFLDKLVDEIGVGYVYDHGSVSEYRLSEIKPLHNFLTQLQPFLKLKQKQANLVLKIIEQLPSAKESPDKFLEVCTWVDQIAALNDSKTRKTTSETVRAVLDSLPGSVGGLSPSQASSAASSASSSPGSGISEALRAGAGSGTGYNKEFLLYLAGFVDGDGSIYACIKPLQRLKFKHFLSLEFRVSQKTQRRWFLDKLVDEIGVGHVYDYGSVSEYRLSEIKPLHNFLTQLQPFLKLKQKQANLVLKIIEQLPSAKESPDKFLEVCTWVDQIAALNDSKTRKTTSETVRAVLDSLSEKKKSSP

SEQ ID NO: 91 - protein, 354 aa, Artificial Sequence
  Synthesized
MNTKYNKEFLLYLAGFVDGDGSIYASIQPRQRSKFKHSLQLYFNVGQKTQRRWFLDKLVDEIGVGYVYDHGSVSEYRLSEIKPLHNFLTQLQPFLKLKQKQANLVLKIIEQLPSAKESPDKFLEVCTWVDQIAALNDSKTRKTTSETVRAVLDSLPGSVGGLSPSQASSAASSASSSPGSGISEALRAGAGSGTGYNKEFLLYLAGFVDGDGSIYASIKPLQMLKFKHSLHLEFRVTQKTQRRWFLDKLVDEIGVGHVYDAGSVSDYRLSEIKPLHNFLTQLQPFLKLKQKQANLVLKIIEQLPSAKESPDKFLEVCTWVDQIAALNDSKTRKTTSETVRAVLDSLSEKKKSSP

SEQ ID NO: 92 - protein, 354 aa, Artificial Sequence
  Synthesized
MNTKYNKEFLLYLAGFVDGDGSIYASIQPRQRSKFKHSLQLYFNVGQKTQRRWFLDKLVDEIGVGYVYDHGSVSEYRLSEIKPLHNFLTQLQPFLKLKQKQANLVLKIIEQLPSAKESPDKFLEVCTWVDQIAALNDSKTRKTTSETVRAVLDSLPGSVGGLSPSQASSAASSASSSPGSGISEALRAGAGSGTGYNKEFLLYLAGFVDGDGSIYASIKPRQALKFKHFLHLEFRVHQKTQRRWFLDKLVDEIGVGHVYDVGSVSEYRLSEIKPLHNFLTQLQPFLKLKQKQANLVLKIIEQLPSAKESPDKFLEVCTWVDQIAALNDSKTRKTTSETVRAVLDSLSEKKKSSP

SEQ ID NO: 93 - protein, 354 aa, Artificial Sequence
  Synthesized
MNTKYNKEFLLYLAGFVDGDGSIYASIQPRQRSKFKHSLQLYFNVGQKTQRRWFLDKLVDEIGVGYVYDHGSVSEYRLSEIKPLHNFLTQLQPFLKLKQKQANLVLKIIEQLPSAKESPDKFLEVCTWVDQIAALNDSKTRKTTSETVRAVLDSLPGSVGGLSPSQASSAASSASSSPGSGISEALRAGAGSGTGYNKEFLLYLAGFVDGDGSIYATIKPGQWLKFKHYLSLEFRVSQKTQRRWFLDKLVDEIGVGHVYDAGSVSEYRLSEIKPLHNFLTQLQPFLKLKQKQANLVLKIIEQLPSAKESPDKFLEVCTWVDQIAALNDSKTRKTTSETVRAVLDSLSEKKKSSP

SEQ ID NO: 94 - protein, 354 aa, Artificial Sequence
  Synthesized
MNTKYNKEFLLYLAGFVDGDGSIYASIQPRQRSKFKHSLQLYFNVGQKTQRRWFLDKLVDEIGVGYVYDHGSVSEYRLSEIKPLHNFLTQLQPFLKLKQKQANLVLKIIEQLPSAKESPDKFLEVCTWVDQIAALNDSKTRKTTSETVRAVLDSLPGSVGGLSPSQASSAASSASSSPGSGISEALRAGAGSGTGYNKEFLLYLAGFVDGDGSIYAGIKPRQRLKFKHQLLLEFRVSQKTQRRWFLDKLVDEIGVGHVYDAGSVSEYRLSEIKPLHNFLTQLQPFLKLKQKQANLVLKIIEQLPSAKESPDKFLEVCTWVDQIAALNDSKTRKTTSETVRAVLDSLSEKKKSSP

SEQ ID NO: 95 - protein, 354 aa, Artificial Sequence
  Synthesized
MNTKYNKEFLLYLAGFVDGDGSIYASIQPRQRSKFKHSLQLYFNVGQKTQRRWFLDKLVDEIGVGYVYDHGSVSEYRLSEIKPLHNFLTQLQPFLKLKQKQANLVLKIIEQLPSAKESPDKFLEVCTWVDQIAALNDSKTRKTTSETVRAVLDSLPGSVGGLSPSQASSAASSASSSPGSGISEALRAGAGSGTGYNKEFLLYLAGFVDGDGSIYARIKPNQTLKFKHSLGLEFRVSQKTQRRWFLDKLVDEIGVGHVYDLGSVSDYRLSEIKPLHNFLTQLQPFLKLKQKQANLVLKIIEQLPSAKESPDKFLEVCTWVDQIAALNDSKTRKTTSETVRAVLDSLSEKKKSSP

SEQ ID NO: 96 - protein, 354 aa, Artificial Sequence
  Synthesized
MNTKYNKEFLLYLAGFVDGDGSIYASIQPRQRSKFKHSLQLYFNVGQKTQRRWFLDKLVDEIGVGYVYDHGSVSEYRLSEIKPLHNFLTQLQPFLKLKQKQANLVLKIIEQLPSAKESPDKFLEVCTWVDQIAALNDSKTRKTTSETVRAVLDSLPGSVGGLSPSQASSAASSASSSPGSGISEALRAGAGSGTGYNKEFLLYLAGFVDGDGSIYAGIKPRQSLKFKHGLTLEFRVAQKTQRRWFLDKLVDEIGVGHVYDFGSVSEYRLSEIKPLHNFLTQLQPFLKLKQKQANLVLKIIEQLPSAKESPDKFLEVCTWVDQIAALNDSKTRKTTSETVRAVLDSLSEKKKSSP

SEQ ID NO: 97 - protein, 354 aa, Artificial Sequence
  Synthesized
MNTKYNKEFLLYLAGFVDGDGSIYASIKPMQCLKFKHQLLLSFKVSQKTQRRWFLDKLVDEIGVGYVYDYGSVSEYGLSQIKPLHNFLTQLQPFLKLKQKQANLVLKIIEQLPSAKESPDKFLEVCTWVDQIAALNDSKTRKTTSETVRAVLDSLPGSVGGLSPSQASSAASSASSSPGSGISEALRAGAGSGTGYNKEFLLYLAGFVDGDGSIYATICPHQMAKFKHYLQLRFEVGQKTQRRWFLDKLVDEIGVGYVTDHGSVSRYILSQIKPLHNFLTQLQPFLKLKQKQANLVLKIIEQLPSAKESPDKFLEVCTWVDQIAALNDSKTRKTTSETVRAVLDSLSEKKKSSP

SEQ ID NO: 98 - protein, 354 aa, Artificial Sequence
  Synthesized
MNTKYNKEFLLYLAGFVDGDGSIFASIKPNQTLKFKHALSLEFRVAQKTQRRWFLDKLVDEIGVGHVYDFGSVSEYRLSQIKPLHNFLTQLQPFLKLKQKQANLVLKIIEQLPSAKESPDKFLEVCTWVDQIAALNDSKTRKTTSETVRAVLDSLPGSVGGLSPSQASSAASSASSSPGSGISEALRAGAGSGTGYNKEFLLYLAGFVDGDGSIYASICPKQGAKFKHFLILCFEVGQKTQRRWFLDKLVDEIGVGYVYDQGSVSIYRLSQIKPLHNFLTQLQPFLKLKQKQANLVLKIIEQLPSAKESPDKFLEVCTWVDQIAALNDSKTRKTTSETVRAVLDSLSEKKKSSP

SEQ ID NO: 99 - protein, 354 aa, Artificial Sequence
  Synthesized
MNTKYNKEFLLYLAGFVDGDGSIYATISPNQSCKFKHQLKLQFTVSQKTQRRWFLDKLVDEIGVGYVYDFGSVSQYGLSQIKPLHNFLTQLQPFLKLKQKQANLVLKIIEQLPSAKESPDKFLEVCTWVDQIAALNDSKTRKTTSETVRAVLDSLPGSVGGLSPSQASSAASSASSSPGSGISEALRAGAGSGTGYNKEFLLYLAGFVDGDGSIYATITPRQTAKFKHSLSLKFEVGQKTQRRWFLDKLVDEIGVGYVTDCGSVSRYILSQIKPLHNFLTQLQPFLKLKQKQANLVLKIIEQLPSAKESPDKFLEVCTWVDQIAALNDSKTRKTTSETVRAVLDSLSEKKKSSP

SEQ ID NO: 100 - protein, 354 aa, Artificial Sequence
  Synthesized
MNTKYNKEFLLYLAGFVDGDGSIFASIKPNQTLKFKHALSLEFRVAQKTQRRWFLDKLVDEIGVGHVYDFGSVSEYRLSQIKPLHNFLTQLQPFLKLKQKQANLVLKIIEQLPSAKESPDKFLEVCTWVDQIAALNDSKTRKTTSETVRAVLDSLPGSVGGLSPSQASSAASSASSSPGSGISEALRAGAGSGTGYNKEFLLYLAGFVDGDGSIYASIFPRQLMKFKHELQLNFSVSQKTQRRWFLDKLVDEIGVGYVIDHGSVSEYRLSEIKPLHNFLTQLQPFLKLKQKQANLVLKIIEQLPSAKESPDKFLEVCTWVDQIAALNDSKTRKTTSETVRAVLDSLSEKKKSSP

SEQ ID NO: 101 - protein, 354 aa, Artificial Sequence
  Synthesized
MNTKYNKEFLLYLAGFVDGDGSIYATIHPEQSVKFKHRLRLRFAVTQKTQRRWFLDKLVDEIGVGYVYDRGSVSDYILSEIKPLHNFLTQLQPFLKLKQKQANLVLKIIEQLPSAKESPDKFLEVCTWVDQIAALNDSKTRKTTSETVRAVLDSLPGSVGGLSPSQASSAASSASSSPGSGISEALRAGAGSGTGYNKEFLLYLAGFVDGDGSIYAQICPTQRMKFKHRLRLSFDVRQKTQRRWFLDKLVDEIGVGYVYDSGSVSSYRLSEIKPLHNFLTQLQPFLKLKQKQANLVLKIIEQLPSAKESPDKFLEVCTWVDQIAALNDSKTRKTTSETVRAVLDSLSEKKKSSP

SEQ ID NO: 102 - protein, 354 aa, Artificial Sequence
  Synthesized
MNTKYNKEFLLYLAGFVDGDGSIYACIEPNQGYKFKHVLRLRFVVSQKTQRRWFLDKLVDEIGVGYVYDRGSVSDYILSEIKPLHNFLTQLQPFLKLKQKQANLVLKIIEQLPSAKESPDKFLEVCTWVDQIAALNDSKTRKTTSETVRAVLDSLPGSVGGLSPSQASSAASSASSSPGSGISEALRAGAGSGTGYNKEFLLYLAGFVDGDGSIYAVIAPHQTLKFKHTLKLCFNVSQKTQRRWFLDKLVDEIGVGYVRDRGSVSDYRLSQIKPLHNFLTQLQPFLKLKQKQANLVLKIIEQLPSAKESPDKFLEVCTWVDQIAALNDSKTRKTTSETVRAVLDSLSEKKKSSP

SEQ ID NO: 103 - protein, 354 aa, Artificial Sequence
  Synthesized
MNTKYNKEFLLYLAGFVDGDGSIYATIHPEQSVKFKHRLRLRFAVTQKTQRRWFLDKLVDEIGVGYVYDRGSVSDYILSEIKPLHNFLTQLQPFLKLKQKQANLVLKIIEQLPSAKESPDKFLEVCTWVDQIAALNDSKTRKTTSETVRAVLDSLPGSVGGLSPSQASSAASSASSSPGSGISEALRAGAGSGTGYNKEFLLYLAGFVDGDGSIYALICPAQSLKFKHGLRLAFRVRQKTQRRWFLDKLVDEIGVGYVWDQGSVSCYSLSEIKPLHNFLTQLQPFLKLKQKQANLVLKIIEQLPSAKESPDKFLEVCTWVDQIAALNDSKTRKTTSETVRAVLDSLSEKKKSSP

SEQ ID NO: 104 - protein, 354 aa, Artificial Sequence
  Synthesized
MNTKYNKEFLLYLAGFVDGDGSIYASIVPVQWGKFKHRLRLWFNVSQKTQRRWFLDKLVDEIGVGYVRDRGSVSDYRLSEIKPLHNFLTQLQPFLKLKQKQANLVLKIIEQLPSAKESPDKFLEVCTWVDQIAALNDSKTRKTTSETVRAVLDSLPGSVGGLSPSQASSAASSASSSPGSGISEALRAGAGSGTGYNKEFLLYLAGFVDGDGSIYATIIPQQWGKFKHRLRLWFVVRQKTQRRWFLDKLVDEIGVGYVYDDGSVSSYVLSEIKPLHNFLTQLQPFLKLKQKQANLVLKIIEQLPSAKESPDKFLEVCTWVDQIAALNDSKTRKTTSETVRAVLDSLSEKKKSSP

SEQ ID NO: 105 - protein, 354 aa, Artificial Sequence
  Synthesized
MNTKYNKEFLLYLAGFVDGDGSIYAVIAPHQTLKFKHTLKLCFNVSQKTQRRWFLDKLVDEIGVGYVRDRGSVSDYRLSQIKPLHNFLTQLQPFLKLKQKQANLVLKIIEQLPSAKESPDKFLEVCTWVDQIAALNDSKTRKTTSETVRAVLDSLPGSVGGLSPSQASSAASSASSSPGSGISEALRAGAGSGTGYNKEFLLYLAGFVDGDGSIYACIEPNQGYKFKHRLRLWFVVRQKTQRRWFLDKLVDEIGVGYVYDDGSVSSYVLSQIKPLHNFLTQLQPFLKLKQKQANLVLKIIEQLPSAKESPDKFLEVCTWVDQIAALNDSKTRKTTSETVRAVLDSLSEKKKSSP

SEQ ID NO: 106 - protein, 354 aa, Artificial Sequence
  Synthesized
MNTKYNKEFLLYLAGFVDGDGSIYASIVPVQWGKFKHRLRLWFNVSQKTQRRWFLDKLVDEIGVGYVRDRGSVSDYRLSQIKPLHNFLTQLQPFLKLKQKQANLVLKIIEQLPSAKESPDKFLEVCTWVDQIAALNDSKTRKTTSETVRAVLDSLPGSVGGLSPSQASSAASSASSSPGSGISEALRAGAGSGTGYNKEFLLYLAGFVDGDGSIYATIIPQQWGKFKHRLRLWFVVRQKTQRRWFLDKLVDEIGVGCVYGRGSVSSYVLSEIKPLHNFLTQLQPFLKLKQKQANLVLKIIEQLPSAKESPDKFLEVCTWVDQIAALNDSKTRKTTSETVRAVLDSLSEKKKSSP

SEQ ID NO: 107 - protein, 354 aa, Artificial Sequence; identical to SEQ ID NO: 104
  Synthesized

SEQ ID NO: 108 - protein, 354 aa, Artificial Sequence
  Synthesized
MNTKYNKEFLLYLAGFVDGDGSIYASIVPVQWGKFKHRLRLWFNVSQKTQRRWFLDKLVDEIGVGYVRDRGSVSDYRLSEIKPLHNFLTQLQPFLKLKQKQANLVLKIIEQLPSAKESPDKFLEVCTWVDQIAALNDSKTRKTTSETVRAVLDSLPGSVGGLSPSQASSAASSASSSPGSGISEALRAGAGSGTGYNKEFLLYLAGFVDGDGSIFATIIPQQWGKFKHRLRLWFVVRQKTQRRWFLDKLVDEIGVGYVYDDGSVSSYVLSEIKPLHNFLTQLQPFLKLKQKQANLVLKIIEQLPSAKESPDKFLEVCTWVDQIAALNDSKTRKTTSETVRAVLDSLSEKKKSSP

SEQ ID NO: 109 - protein, 354 aa, Artificial Sequence
  Synthesized
MNTKYNKEFLLYLAGFVDGDGSIYAVIAPHQTLKFKHTLKLCFNVSQKTQRRWFLDKLVDEIGVGYVRDRGSVSDYRLSQIKPLHNFLTQLQPFLKLKQKQANLVLKIIEQLPSAKESPDKFLEVCTWVDQIAALNDSKTRKTTSETVRAVLDSLPGSVGGLSPSQASSAASSASSSPGSGISEALRAGAGSGTGYNKEFLLYLAGFVDGDGSIYATIIPQQWGKFKHRLRLWFVVRQKTQRRWFLDKLVDEIGVGCVYDDGSVSSYVLSQIKPLHNFLTQLQPFLKLKQKQANLVLKIIEQLPSAKESPDKFLEVCTWVDQIAALNDSKTRKTTSETVRAVLDSLSEKKKSSP

SEQ ID NO: 110 - protein, 354 aa, Artificial Sequence
  Synthesized
MNTKYNKEFLLYLAGFVDGDGSIYATIHPEQSVKFKHRLRLRFAVTQKTQRRWFLDKLVDEIGVGYVYDRGSVSDYILSEIKPLHNFLTQLQPFLKLKQKQANLVLKIIEQLPSAKESPDKFLEVCTWVDQIAALNDSKTRKTTSETVRAVLDSLPGSVGGLSPSQASSAASSASSSPGSGISEALRAGAGSGTGYNKEFLLYLAGFVDGDGSIYAVIAPHQTLKFKHTLKLCFNVSQKTQRRWFLDKLVDEIGVGYVRDRGSVSDYRLSEIKPLHNFLTQLQPFLKLKQKQANLVLKIIEQLPSAKESPDKFLEVCTWVDQIAALNDSKTRKTTSETVRAVLDSLSEKKKSSP

SEQ ID NO: 111 - protein, 354 aa, Artificial Sequence
  Synthesized
MNTKYNKEFLLYLAGFVDGDGSIYASIVPVQWGKFKHRLRLWFNVSQKTQRRWFLDKLVDEIGVGYVRDRGSVSDYRLSQIKPLHNFLTQLQPFLKLKQKQANLVLKIIEQLPSAKESPDKFLEVCTWVDQIAALNDSKTRKTTSETVRAVLDSLPGSVGGLSPSQASSAASSASSSPGSGISEALRAGAGSGTGYNKEFLLYLAGFVDGDGSIYATIIPQQWGKFKHRLRLWFVVRQKTQRRWFLDKLVDEIGVGYVYDDGSVSSYVLSEIKPLHNFLTQLQPFLKLKQKQANLVLKIIEQLPSAKESPDKFLEVCTWVDQIAALNDSKTRKTTSETVRAVLDSLSEKKKSSP

SEQ ID NO: 112 - protein, 354 aa, Artificial Sequence
  Synthesized
MNTKYNKEFLLYLAGFVDGDGSIYATIIPQQWGKFKHRLRLWFVVRQKTQRRWFLDKLVDEIGVGCVYDDGSVSSYVLSEIKPLHNFLTQLQPFLKLKQKQANLVLKIIEQLPSAKESPDKFLEVCTWVDQIAALNDSKTRKTTSETVRAVLDSLPGSVGGLSPSQASSAASSASSSPGSGISEALRAGAGSGTGYNKEFLLYLAGFVDGDGSIYAVIAPHQTLKFKHTLKLCFNVSQKTQRRWFLDKLVDEIGVGYVRDRGSVSDYRLSQIKPLHNFLTQLQPFLKLKQKQANLVLKIIEQLPSAKESPDKFLEVCTWVDQIAALNDSKTRKTTSETVRAVLDSLSEKKKSSP

SEQ ID NO: 113 - protein, 354 aa, Artificial Sequence
  Synthesized
MNTKYNKEFLLYLAGFVDGDGSIYATIIPQQWGKFKHRLRLWFVVRQKTQRRWFLDKLVDEIGVGCVYDDGSVSSYVLSQIKPLHNFLTQLQPFLKLKQKQANLVLKIIEQLPSAKESPDKFLEVCTWVDQIAALNDSKTRKTTSETVRAVLDSLPGSVGGLSPSQASSAASSASSSPGSGISEALRAGAGSGTGYNKEFLLYLAGFVDGDGSIYAVIAPHQTLKFKHTLKLCFNVSQKTQRRWFLDKLVDEIGVGYVRDRGSVSDYRLSQIKPLHNFLTQLQPFLKLKQKQANLVLKIIEQLPSAKESPDKFLEVCTWVDQIAALNDSKTRKTTSETVRAVLDSLSEKKKSSP

SEQ ID NO: 114 - protein, 354 aa, Artificial Sequence
  Synthesized
MNTKYNKEFLLYLAGFVDGDGSIYATIHPRQDLKFKHVLRLRFSVFQKTQRRWFLDKLVDEIGVGYVYDAGSVSEYRLSEIKPLHNFLTQLQPFLKLKQKQANLVLKIIEQLPSAKESPDKFLEVCTWVDQIAALNDSKTRKTTSETVRAVLDSLPGSVGGLSPSQASSAASSASSSPGSGISEALRAGAGSGTGYNKEFLLYLAGFVDGDGSIYACIAPCQRNKFKHQLSLRFDVFQKTQRRWFLDKLVDEIGVGYVNDSGSVSRYRLSQIKPLHNFLTQLQPFLKLKQKQANLVLKIIEQLPSAKESPDKFLEVCTWVDQIAALNDSKTRKTTSETVRAVLDSLSEKKKSSP

SEQ ID NO: 115 - protein, 354 aa, Artificial Sequence
  Synthesized
MNTKYNKEFLLYLAGFVDGDGSIFASIHPRQSAKFKHYLRLRFSVFQKTQRRWFLDKLVDEIGVGYVYDAGSVSEYRLSQIKPLHNFLTQLQPFLKLKQKQANLVLKIIEQLPSAKESPDKFLEVCTWVDQIAALNDSKTRKTTSETVRAVLDSLPGSVGGLSPSQASSAASSASSSPGSGISEALRAGAGSGTGYNKEFLLYLAGFVDGDGSIYAEIRPGQIAKFKHTLTLHFAVYQKTQRRWFLDKLVDEIGVGYVSDSGSVSRYRLSQIKPLHNFLTQLQPFLKLKQKQANLVLKIIEQLPSAKESPDKFLEVCTWVDQIAALNDSKTRKTTSETVRAVLDSLSEKKKSSP

SEQ ID NO: 116 - protein, 354 aa, Artificial Sequence
  Synthesized
MNTKYNKEFLLYLAGFVDGDGSIFATITPWQSLKFKHRLRLMFSVFQKTQRRWFLDKLVDEIGVGYVYDGGSVSEYRLSQIKPLHNFLTQLQPFLKLKQKQANLVLKIIEQLPSAKESPDKFLEVCTWVDQIAALNDSKTRKTTSETVRAVLDSLPGSVGGLSPSQASSAASSASSSPGSGISEALRAGAGSGTGYNKEFLLYLAGFVDGDGSIYAEIRPHQNSKFKHQLVLRFEVYQKTQRRWFLDKLVDEIGVGYVNDGGSVSRYRLSQIKPLHNFLTQLQPFLKLKQKQANLVLKIIEQLPSAKESPDKFLEVCTWVDQIAALNDSKTRKTTSETVRAVLDSLSEKKKSSP

SEQ ID NO: 117 - protein, 354 aa, Artificial Sequence
  Synthesized
MNTKYNKEFLLYLAGFVDGDGSIWAEIRPCQRSKFKHHLCLRFNVTQKTQRRWFLDKLVDEIGVGYVRDTGSVSQYNLSEIKPLHNFLTQLQPFLKLKQKQANLVLKIIEQLPSAKESPDKFLEVCTWVDQIAALNDSKTRKTTSETVRAVLDSLPGSVGGLSPSQASSAASSASSSPGSGISEALRAGAGSGTGYNKEFLLYLAGFVDGDGSIFATITPWQSLKFKHRLRLMFSVFQKTQRRWFLDKLVDEIGVGYVYDGGSVSEYRLSEIKPLHNFLTQLQPFLKLKQKQANLVLKIIEQLPSAKESPDKFLEVCTWVDQIAALNDSKTRKTTSETVRAVLDSLSEKKKSSP

SEQ ID NO: 118 - protein, 354 aa, Artificial Sequence
  Synthesized
MNTKYNKEFLLYLAGFVDGDGSIFATITPWQTLKFKHRLRLNFSVFQKTQRRWFLDKLVDEIGVGYVYDAGSVSEYRLSQIKPLHNFLTQLQPFLKLKQKQANLVLKIIEQLPSAKESPDKFLEVCTWVDQIAALNDSKTRKTTSETVRAVLDSLPGSVGGLSPSQASSAASSASSSPGSGISEALRAGAGSGTGYNKEFLLYLAGFVDGDGSIYASITPTQLNKFKHQLGLCFQVTQKTQRRWFLDKLVDEIGVGYVTDSGSVSRYRLSEIKPLHNFLTQLQPFLKLKQKQANLVLKIIEQLPSAKESPDKFLEVCTWVDQIAALNDSKTRKTTSETVRAVLDSLSEKKKSSP

SEQ ID NO: 119 - protein, 354 aa, Artificial Sequence
  Synthesized
MNTKYNKEFLLYLAGFVDGDGSIYACIAPCQRNKFKHQLSLRFDVFQKTQRRWFLDKLVDEIGVGYVNDSGSVSRYRLSQIKPLHNFLTQLQPFLKLKQKQANLVLKIIEQLPSAKESPDKFLEVCTWVDQIAALNDSKTRKTTSETVRAVLDSLPGSVGGLSPSQASSAASSASSSPGSGISEALRAGAGSGTGYNKEFLLYLAGFVDGDGSIYATIHPRQDLKFKHVLRLRFSVFQKTQRRWFLDKLVDEIGVGYVYDAGSVSEYRLSQIKPLHNFLTQLQPFLKLKQKQANLVLKIIEQLPSAKESPDKFLEVCTWVDQIAALNDSKTRKTTSETVRAVLDSLSEKKKSSP

SEQ ID NO: 120 - protein, 354 aa, Artificial Sequence
  Synthesized
MNTKYNKEFLLYLAGFVDGDGSIWAEIRPCQRSKFKHQLVLMFAVYQKTQRRWFLDKLVDEIGVGYVNDGGSVSRYRLSQIKPLHNFLTQLQPFLKLKQKQANLVLKIIEQLPSAKESPDKFLEVCTWVDQIAALNDSKTRKTTSETVRAVLDSLPGSVGGLSPSQASSAASSASSSPGSGISEALRAGAGSGTGYNKEFLLYLAGFVDGDGSIYATIHPRQKVKFKHLLRLRFSVFQRTQRRWFLDKLVDEIGVGYVYDAGSVSEYRLSQIKPLHNFLTQLQPFLKLKQKQANLVLKIIEQLPSAKESPDKFLEVCTWVDQIAALNDSKTRKTTSETVRAVLDSLSEKKKSSP

SEQ ID NO: 121 - protein, 354 aa, Artificial Sequence
  Synthesized
MNTKYNKEFLLYLAGFVDGDGSIYACIQPMQNAKFKHHLSLHFQVTQKTQRRWFLDKLVDEIGVGYVSDSGSVSRYRLSEIKPLHNFLTQLQPFLKLKQKQANLVLKIIEQLPSAKESPDKFLEVCTWVDQIAALNDSKTRKTTSETVRAVLDSLPGSVGGLSPSQASSAASSASSSPGSGISEALRAGAGSGTGYNKEFLLYLAGFVDGDGSIFASIHPRQTGKFKHFLRLRFNVCQKTQRRWFLDKLVDEIGVGYVYDTGSVSEYRLSQIKPLHNFLTQLQPFLKLKQKQANLVLKIIEQLPSAKESPDKFLEVCTWVDQIAALNDSKTRKTTSETVRAVLDSLSEKKKSSP

SEQ ID NO: 122 - protein, 354 aa, Artificial Sequence
  Synthesized
MNTKYNKEFLLYLAGFVDGDGSIYACIQPSQGSKFKHILALRFEVYQKTQRRWFLDKLVDEIGVGYVIDKGSVSRYRLSQIKPLHNFLTQLQPFLKLKQKQANLVLKIIEQLPSAKESPDKFLEVCTWVDQIAALNDSKTRKTTSETVRAVLDSLPGSVGGLSPSQASSAASSASSSPGSGISEALRAGAGSGTGYNKEFLLYLAGFVDGDGSIFACIKPWQTLKFKHRLYLSFSVYQKTQRRWFLDKLVDEIGVGYVYDAGSVSEYRLSQIKPLHNFLTQLQPFLKLKQKQANLVLKIIEQLPSAKESPDKFLEVCTWVDQIAALNDSKTRKTTSETVRAVLDSLSEKKKSSP

SEQ ID NO: 123 - protein, 354 aa, Artificial Sequence
  Synthesized
MNTKYNKEFLLYLAGFVDGDGSIYACIQPDQRGKFKHTLSLRFEVFQKTQRRWFLDKLVDEIGVGYVNDSGSVSRYRLSQIKPLHNFLTQLQPFLKLKQKQANLVLKIIEQLPSAKESPDKFLEVCTWVDQIAALNDSKTRKTTSETVRAVLDSLPGSVGGLSPSQASSAASSASSSPGSGISEALRAGAGSGTGYNKEFLLYLAGFVDGDGSIFASIHPRQSAKFKHYLRLRFSVFQKTQRRWFLDKLVDEIGVGYVYDAGSVSEYRLSQIKPLHNFLTQLQPFLKLKQKQANLVLKIIEQLPSAKESPDKFLEVCTWVDQIAALNDSKTRKTTSETVRAVLDSLSEKKKSSP

SEQ ID NO: 124 - protein, 354 aa, Artificial Sequence
  Synthesized
MNTKYNKEFLLYLAGFVDGDGSIYASILPQQEVKFKHTLQLRFEVYQKTQRRWFLDKLVDEIGVGYVNDSGSVSRYRLSQIKPLHNFLTQLQPFLKLKQKQANLVLKIIEQLPSAKESPDKFLEVCTWVDQIAALNDSKTRKTTSETVRAVLDSLPGSVGGLSPSQASSAASSASSSPGSGISEALRAGAGSGTGYNKEFLLYLAGFVDGDGSIYASIHPRQAAKFKHYLRLRFSVFQKTQRRWFLDKLVDEIGVGYVYDAGSVSEYRLSQIKPLHNFLTQLQPFLKLKQKQANLVLKIIEQLPSAKESPDKFLEVCTWVDQIAALNDSKTRKTTSETVRAVLDSLSEKKKSSP

SEQ ID NO: 125 - protein, 354 aa, Artificial Sequence
  Synthesized
MNTKYNKEFLLYLAGFVDGDGSIYASIWPRQDCKFKHGLKLGFQVTQKTQRRWFLDKLVDEIGVGYVRDRGSVSDYALSQIKPLHNFLTQLQPFLKLKQKQANLVLKIIEQLPSAKESPDKFLEVCTWVDQIAALNDSKTRKTTSETVRAVLDSLPGSVGGLSPSQASSAASSASSSPGSGISEALRAGAGSGTGYNKEFLLYLAGFVDGDGSIFARIRPCQTCKFKHKLDLVFSVGQKTQRRWFLDKLVDEIGVGYVVDRGSVSEYNLSQIKPLHNFLTQLQPFLKLKQKQANLVLKIIEQLPSAKESPDKFLEVCTWVDQIAALNDSKTRKTTSETVRAVLDSLSEKKKSSP

SEQ ID NO: 126 - protein, 354 aa, Artificial Sequence
  Synthesized
MNTKYNKEFLLYLAGFVDGDGSIFARIRPCQTCKFKHKLDLVFSVGQKTQRRWFLDKLVDEIGVGYVVDRGSVSEYILSQIKPLHNFLTQLQPFLKLKQKQANLVLKIIEQLPSAKESPDKFLEVCTWVDQIAALNDSKTRKTTSETVRAVLDSLPGSVGGLSPSQASSAASSASSSPGSGISEALRAGAGSGTGYNKEFLLYLAGFVDGDGSIYASIWPRQDCKFKHGLKLGFQVTQKTQRRWFLDKLVDEIGVGYVRDRGSVSDYCLSEIKPLHNFLTQLQPFLKLKQKQANLVLKIIEQLPSAKESPDKFLEVCTWVDQIAALNDSKTRKTTSETVRAVLDSLSEKKKSSP

SEQ ID NO: 127 - DNA, 4627 bp, Homo sapiens
atatccagaaccctgaccctgccgtgtaccagctgagagactctaaatccagtgacaagtctgtctgcctattcaccgattttgattctcaaacaaatgtgtcacaaagtaaggattctgatgtgtatatcacagacaaaactgtgctagacatgaggtctatggacttcaagagcaacagtgctgtggcctggagcaacaaatctgactttgcatgtgcaaacgccttcaacaacagcattattccagaagacaccttcttccccagcccaggtaagggcagctttggtgccttcgcaggctgtttccttgcttcaggaatggccaggttctgcccagagctctggtcaatgatgtctaaaactcctctgattggtggtctcggccttatccattgccaccaaaaccctctttttactaagaaacagtgagccttgttctggcagtccagagaatgacacgggaaaaaagcagatgaagagaaggtggcaggagagggcacgtggcccagcctcagtctctccaactgagttcctgcctgcctgcctttgctcagactgtttgccccttactgctcttctaggcctcattctaagccccttctccaagttgcctctccttatttctccctgtctgccaaaaaatctttcccagctcactaagtcagtctcacgcagtcactcattaacccaccaatcactgattgtgccggcacatgaatgcaccaggtgttgaagtggaggaattaaaaagtcagatgaggggtgtgcccagaggaagcaccattctagttgggggagcccatctgtcagctgggaaaagtccaaataacttcagattggaatgtgttttaactcagggttgagaaaacagctaccttcaggacaaaagtcagggaagggctctctgaagaaatgctacttgaagataccagccctaccaagggcagggagaggaccctatagaggcctgggacaggagctcaatgagaaaggagaagagcagcaggcatgagttgaatgaaggaggcagggccgggtcacagggccttctaggccatgagagggtagacagtattctaaggacgccagaaagctgttgatcggcttcaagcaggggagggacacctaatttgcttttcttttttttttttttttttttttttttttttgagatggagttttgctcttgttgcccaggctggagtgcaatggtgcatcttggctcactgcaacctccgcctcccaggttcaagtgattctcctgcctcagcctcccgagtagctgagattacaggcacccgccaccatgcctggctaattttttgtatttttagtagagacagggtttcactatgttggccaggctggtctcgaactcctgacctcaggtgatccacccgcttcagcctcccaaagtgctgggattacaggcgtgagccaccacacccggcctgcttttcttaaagatcaatctgagtgctgtacggagagtgggttgtaagccaagagtagaagcagaaagggagcagttgcagcagagagatgatggaggcctgggcagggtggtggcagggaggtaaccaacaccattcaggtttcaaaggtagaaccatgcagggatgagaaagcaaagaggggatcaaggaaggcagctggattttggcctgagcagctgagtcaatgatagtgccgtttactaagaagaaaccaaggaaaaaatttggggtgcagggatcaaaactttttggaacatatgaaagtacgtgtttatactctttatggcccttgtcactatgtatgcctcgctgcctccattggactctagaatgaagccaggcaagagcagggtctatgtgtgatggcacatgtggccagggtcatgcaacatgtactttgtacaaacagtgtatattgagtaaatagaaatggtgtccaggagccgaggtatcggtcctgccagggccaggggctctccctagcaggtgctcatatgctgtaagttccctccagatctctccacaaggaggcatggaaaggctgtagttgttcacctgcccaagaactaggaggtctggggtgggagagtcagcctgctctggatgctgaaagaatgtctgtttttccttttagaaagttcctgtgatgtcaagctggtcgagaaaagctttgaaacaggtaagacaggggtctagcctgggtttgcacaggattgcggaagtgatgaacccgcaataaccctgcctggatgagggagtgggaagaaattagtagatgtgggaatgaatgatgaggaatggaaacagcggttcaagacctgcccagagctgggtggggtctctcctgaatccctctcaccatctctgactttccattctaagcactttgaggatgagtttctagcttcaatagaccaaggactctctcctaggcctctgtattcctttcaacagctccactgtcaagagagccagagagagcttctgggtggcccagctgtgaaatttctgagtcccttagggatagccctaaacgaaccagatcatcctgaggacagccaagaggttttgccttctttcaagacaagcaacagtactcacataggctgtgggcaatggtcctgtctctcaagaatcccctgccactcctcacacccaccctgggcccatattcatttccatttgagttgttcttattgagtcatccttcctgtggtagcggaactcactaaggggcccatctggacccgaggtattgtgatgataaattctgagcacctaccccatccccagaagggctcagaaataaaataagagccaagtctagtcggtgtttcctgtcttgaaacacaatactgttggccctggaagaatgcacagaatctgtttgtaaggggatatgcacagaagctgcaagggacaggaggtgcaggagctgcaggcctcccccacccagcctgctctgccttggggaaaaccgtgggtgtgtcctgcaggccatgcaggcctgggacatgcaagcccataaccgctgtggcctcttggttttacagatacgaacctaaactttcaaaacctgtcagtgattgggttccgaatcctcctcctgaaagtggccgggtttaatctgctcatgacgctgcggctgtggtccagctgaggtgaggggccttgaagctgggagtggggtttagggacgcgggtctctgggtgcatcctaagctctgagagcaaacctccctgcagggtcttgcttttaagtccaaagcctgagcccaccaaactctcctacttcttcctgttacaaattcctcttgtgcaataataatggcctgaaacgctgtaaaatatcctcatttcagccgcctcagttgcacttctcccctatgaggtaggaagaacagttgtttagaaacgaagaaactgaggccccacagctaatgagtggaggaagagagacacttgtgtacaccacatgccttgtgttgtacttctctcaccgtgtaacctcctcatgtcctctctccccagtacggctctcttagctcagtagaaagaagacattacactcatattacaccccaatcctggctagagtctccgcaccctcctcccccagggtccccagtcgtcttgctgacaactgcatcctgttccatcaccatcaaaaaaaaactccaggctgggtgcgggggctcacacctgtaatcccagcactttgggaggcagaggcaggaggagcacaggagctggagaccagcctgggcaacacagggagaccccgcctctacaaaaagtgaaaaaattaaccaggtgtggtgctgcacacctgtagtcccagctacttaagaggctgagatgggaggatcgcttgagccctggaatgttgaggctacaatgagctgtgattgcgtcactgcactccagcctggaagacaaagcaagatcctgtctcaaataataaaaaaaataagaactccagggtacatttgctcctagaactctaccacatagccccaaacagagccatcaccatcacatccctaacagtcctgggtcttcctcagtgtccagcctgacttctgttcttcctcattccagatctgcaagattgtaagacagcctgtgctccctcgctccttcctctgcattgcccctcttctccctctccaaacagagggaactctcctacccccaaggaggtgaaagctgctaccacctctgtgcccccccggcaatgccaccaactggatcctacccgaatttatgattaagattgctgaagagctgccaaacactgctgccaccccctctgttcccttattgctgcttgtcactgcctgacattcacggcagaggcaaggctgctgcagcctcccctggctgtgcacattccctcctgctccccagagactgcctccgccatcccacagatgatggatcttcagtgggttctcttgggctctaggtcctgcagaatgttgtgaggggtttatttttttttaatagtgttcataaagaaatacatagtattcttcttctcaagacgtggggggaaattatctcattatcgaggccctgctatgctgtgtatctgggcgtgttgtatgtcctgctgccgatgccttc

SEQ ID NO: 128 - DNA, 22 bp, Homo sapiens
tggcctggagcaacaaatctga

SEQ ID NO: 129 - DNA, 22 bp, Homo sapiens
acaaatgtgtcacaaagtaagg

SEQ ID NO: 130 - DNA, 22 bp, Homo sapiens
ctgatgtgtatatcacagacaa

SEQ ID NO: 131 - protein, 354 aa, Artificial Sequence
  Synthesized
MNTKYNKEFLLYLAGFVDGDGSIFASIYPHQRAKFKHFLKLTFAVYQKTQRRWFLDKLVDEIGVGYVYDSGSVSEYRLSEIKPLHNFLTQLQPFLKLKQKQANLVLKIIEQLPSAKESPDKFLEVCTWVDQIAALNDSRTRKTTSETVRAVLDSLPGSVGGLSPSQASSAASSASSSPGSGISEALRAGAGSGTGYNKEFLLYLAGFVDGDGSIYACIAPRQGSKFKHRLKLGFAVGQKTQRRWFLDKLVDEIGVGYVYDRGSVSEYVLSEIKPLHNFLTQLQPFLKLKQKQANLVLKIIEQLPSAKESPDKFLEVCTWVDQIAALNDSKTRKTTSETVRAVLDSLSEKKKSSP

SEQ ID NO: 132 - protein, 147 aa, Artificial Sequence
  Synthesized
KEFLLYLAGFVDGDGSIYARIKPAQNLKFKHALHLEFRVTQKTQRRWFLDKLVDEIGVGHVYDVGSVSDYRLSEIKPLHNFLTQLQPFLKLKQKQANLVLKIIEQLPSAKESPDKFLEVCTWVDQIAALNDSKTRKTTSETVRAVLD

SEQ ID NO: 133 - protein, 147 aa, Artificial Sequence
  Synthesized
KEFLLYLAGFVDGDGSIYASIKPCQCLKFKHQLFLEFRVTQKTQRRWFLDKLVDEIGVGHVYDSGSVSDYRLSEIKPLHNFLTQLQPFLKLKQKQANLVLKIIEQLPSAKESPDKFLEVCTWVDQIAALNDSKTRKTTSETVRAVLD

SEQ ID NO: 134 - protein, 147 aa, Artificial Sequence
  Synthesized
KEFLLYLAGFVDGDGSIYAVIKPNQALKFKHTLSLEFRVSQKTQRRWFLDKLVDEIGVGHVYDFGSVSEYRLSEIKPLHNFLTQLQPFLKLKQKQANLVLKIIEQLPSAKESPDKFLEVCTWVDQIAALNDSKTRKTTSETVRAVLD

SEQ ID NO: 135 - protein, 147 aa, Artificial Sequence
  Synthesized
KEFLLYLAGFVDGDGSIYASIKPNQTLKFKHALSLEFRVAQKTQRRWFLDKLVDEIGVGHVYDFGSVSEYRLSEIKPLHNFLTQLQPFLKLKQKQANLVLKIIEQLPSAKESPDKFLEVCTWVDQIAALNDSKTRKTTSETVRAVLD

SEQ ID NO: 136 - protein, 147 aa, Artificial Sequence; identical to SEQ ID NO: 135
  Synthesized

SEQ ID NO: 137 - protein, 147 aa, Artificial Sequence
  Synthesized
KEFLLYLAGFVDGDGSIYASIKPNQTLKFKHALSLEFRVAQKTQRRWFLDKLVDEIGVGHVYDFGSVSEYRLSQIKPLHNFLTQLQPFLKLKQKQANLVLKIIEQLPSAKESPDKFLEVCTWVDQIAALNDSKTRKTTSETVRAVLD

SEQ ID NO: 138 - protein, 147 aa, Artificial Sequence; identical to SEQ ID NO: 135
  Synthesized

SEQ ID NO: 139 - protein, 147 aa, Artificial Sequence; identical to SEQ ID NO: 137
  Synthesized

SEQ ID NO: 140 - protein, 147 aa, Artificial Sequence; identical to SEQ ID NO: 135
  Synthesized

SEQ ID NO: 141 - protein, 147 aa, Artificial Sequence; identical to SEQ ID NO: 137
  Synthesized

SEQ ID NO: 142 - protein, 147 aa, Artificial Sequence; identical to SEQ ID NO: 137
  Synthesized

SEQ ID NO: 143 - protein, 147 aa, Artificial Sequence; identical to SEQ ID NO: 137
  Synthesized

SEQ ID NO: 144 - protein, 147 aa, Artificial Sequence; identical to SEQ ID NO: 135
  Synthesized

SEQ ID NO: 145 - protein, 147 aa, Artificial Sequence; identical to SEQ ID NO: 135
  Synthesized

SEQ ID NO: 146 - protein, 147 aa, Artificial Sequence; identical to SEQ ID NO: 135
  Synthesized

SEQ ID NO: 147 - protein, 147 aa, Artificial Sequence; identical to SEQ ID NO: 137
  Synthesized

SEQ ID NO: 148 - protein, 147 aa, Artificial Sequence; identical to SEQ ID NO: 137
  Synthesized

SEQ ID NO: 149 - protein, 147 aa, Artificial Sequence; identical to SEQ ID NO: 137
  Synthesized

SEQ ID NO: 150 - protein, 147 aa, Artificial Sequence
  Synthesized
KEFLLYLAGFVDGDGSIYAQISPQQGCKFKHYLRLSFRVSQKTQRRWFLDKLVDEIGVGYVYDYGSVSDYQLSEIKPLHNFLTQLQPFLKLKQKQANLVLKIIEQLPSAKESPDKFLEVCTWVDQIAALNDSKTRKTTSETVRAVLD

SEQ ID NO: 151 - protein, 147 aa, Artificial Sequence
  Synthesized
KEFLLYLAGFVDGDGSIFASIKPNQTLKFKHALSLEFRVAQKTQRRWFLDKLVDEIGVGHVYDFGSVSEYRLSEIKPLHNFLTQLQPFLKLKQKQANLVLKIIEQLPSAKESPDKFLEVCTWVDQIAALNDSKTRKTTSETVRAVLD

SEQ ID NO: 152 - protein, 147 aa, Artificial Sequence
  Synthesized
KEFLLYLAGFVDGDGSIYASIKPMQCLKFKHQLLLSFKVSQKTQRRWFLDKLVDEIGVGYVYDYGSVSEYVLSEIKPLHNFLTQLQPFLKLKQKQANLVLKIIEQLPSAKESPDKFLEVCTWVDQIAALNDSKTRKTTSETVRAVLD

SEQ ID NO: 153 - protein, 147 aa, Artificial Sequence
  Synthesized
KEFLLYLAGFVDGDGSIFASIKPNQTLKFKHALSLEFRVAQKTQRRWFLDKLVDEIGVGHVYDFGSVSEYRLSQIKPLHNFLTQLQPFLKLKQKQANLVLKIIEQLPSAKESPDKFLEVCTWVDQIAALNDSKTRKTTSETVRAVLD

SEQ ID NO: 154 - protein, 147 aa, Artificial Sequence; identical to SEQ ID NO: 151
  Synthesized

SEQ ID NO: 155 - protein, 147 aa, Artificial Sequence; identical to SEQ ID NO: 153
  Synthesized

SEQ ID NO: 156 - protein, 147 aa, Artificial Sequence; identical to SEQ ID NO: 151
  Synthesized

SEQ ID NO: 157 - protein, 147 aa, Artificial Sequence; identical to SEQ ID NO: 135
  Synthesized

SEQ ID NO: 158 - protein, 147 aa, Artificial Sequence; identical to SEQ ID NO: 135
  Synthesized

SEQ ID NO: 159 - protein, 147 aa, Artificial Sequence; identical to SEQ ID NO: 135
  Synthesized

SEQ ID NO: 160 - protein, 147 aa, Artificial Sequence; identical to SEQ ID NO: 135
  Synthesized

SEQ ID NO: 161 - protein, 147 aa, Artificial Sequence; identical to SEQ ID NO: 135
  Synthesized

SEQ ID NO: 162 - protein, 147 aa, Artificial Sequence; identical to SEQ ID NO: 135
  Synthesized

SEQ ID NO: 163 - protein, 147 aa, Artificial Sequence; identical to SEQ ID NO: 135
  Synthesized

SEQ ID NO: 164 - protein, 147 aa, Artificial Sequence; identical to SEQ ID NO: 135
  Synthesized

SEQ ID NO: 165 - protein, 147 aa, Artificial Sequence; identical to SEQ ID NO: 135
  Synthesized

SEQ ID NO: 166 - protein, 147 aa, Artificial Sequence; identical to SEQ ID NO: 135
  Synthesized

SEQ ID NO: 167 - protein, 147 aa, Artificial Sequence; identical to SEQ ID NO: 135
  Synthesized

SEQ ID NO: 168 - protein, 147 aa, Artificial Sequence; identical to SEQ ID NO: 135
  Synthesized

SEQ ID NO: 169 - protein, 147 aa, Artificial Sequence; identical to SEQ ID NO: 135
  Synthesized

SEQ ID NO: 170 - protein, 147 aa, Artificial Sequence; identical to SEQ ID NO: 135
  Synthesized

SEQ ID NO: 171 - protein, 147 aa, Artificial Sequence; identical to SEQ ID NO: 135
  Synthesized

SEQ ID NO: 172 - protein, 147 aa, Artificial Sequence; identical to SEQ ID NO: 135
  Synthesized

SEQ ID NO: 173 - protein, 147 aa, Artificial Sequence; identical to SEQ ID NO: 135
  Synthesized

SEQ ID NO: 174 - protein, 147 aa, Artificial Sequence; identical to SEQ ID NO: 135
  Synthesized

SEQ ID NO: 175 - protein, 147 aa, Artificial Sequence; identical to SEQ ID NO: 135
  Synthesized

SEQ ID NO: 176 - protein, 147 aa, Artificial Sequence; identical to SEQ ID NO: 135
  Synthesized

SEQ ID NO: 177 - protein, 147 aa, Artificial Sequence; identical to SEQ ID NO: 135
  Synthesized

SEQ ID NO: 178 - protein, 147 aa, Artificial Sequence
  Synthesized
KEFLLYLAGFVDGDGSIYATIKPAQALKFKHYLHLEFRVSQKTQRRWFLDKLVDEIGVGHVYDCGSVSEYRLSEIKPLHNFLTQLQPFLKLKQKQANLVLKIIEQLPSAKESPDKFLEVCTWVDQIAALNDSKTRKTTSETVRAVLD

SEQ ID NO: 179 - protein, 147 aa, Artificial Sequence
  Synthesized
KEFLLYLAGFVDGDGSIYASIKPSQQLKFKHQLSLEFRVCQKTQRRWFLDKLVDEIGVGHVYDAGSVSEYRLSEIKPLHNFLTQLQPFLKLKQKQANLVLKIIEQLPSAKESPDKFLEVCTWVDQIAALNDSKTRKTTSETVRAVLD

SEQ ID NO: 180 - protein, 147 aa, Artificial Sequence
  Synthesized
KEFLLYLAGFVDGDGSIYASIKPGQRLKFKHYLYLEFRVIQKTQRRWFLDKLVDEIGVGHVYDMGSVSEYRLSEIKPLHNFLTQLQPFLKLKQKQANLVLKIIEQLPSAKESPDKFLEVCTWVDQIAALNDSKTRKTTSETVRAVLD

SEQ ID NO: 181 - protein, 147 aa, Artificial Sequence
  Synthesized
KEFLLYLAGFVDGDGSIYACIKPSQALKFKHYLVLEFRVFQKTQRRWFLDKLVDEIGVGHVYDNGSVSDYRLSEIKPLHNFLTQLQPFLKLKQKQANLVLKIIEQLPSAKESPDKFLEVCTWVDQIAALNDSKTRKTTSETVRAVLD

SEQ ID NO: 182 - protein, 147 aa, Artificial Sequence
  Synthesized
KEFLLYLAGFVDGDGSIYASIKPMQPLKFKHGLTLEFRVSQKTQRRWFLDKLVDEIGVGHVYDFGSVSEYRLSEIKPLHNFLTQLQPFLKLKQKQANLVLKIIEQLPSAKESPDKFLEVCTWVDQIAALNDSKTRKTTSETVRAVLD

SEQ ID NO: 183 - protein, 147 aa, Artificial Sequence
  Synthesized
KEFLLYLAGFVDGDGSIYALIKPGQRLKFKHYLHLEFRVTQKTQRRWFLDKLVDEIGVGHVYDSGSVSDYRLSEIKPLHNFLTQLQPFLKLKQKQANLVLKIIEQLPSAKESPDKFLEVCTWVDQIAALNDSKTRKTTSETVRAVLD

SEQ ID NO: 184 - protein, 147 aa, Artificial Sequence
  Synthesized
KEFLLYLAGFVDGDGSIYASIKPQQVLKFKHQLHLEFRVSQKTQRRWFLDKLVDEIGVGHVYDAGSVSEYRLSEIKPLHNFLTQLQPFLKLKQKQANLVLKIIEQLPSAKESPDKFLEVCTWVDQIAALNDSKTRKTTSETVRAVLD

SEQ ID NO: 185 - protein, 147 aa, Artificial Sequence
  Synthesized
KEFLLYLAGFVDGDGSIYASIKPGQRLKFKHQLFLEFRVTQKTQRRWFLDKLVDEIGVGHVYDNGSVSEYRLSEIKPLHNFLTQLQPFLKLKQKQANLVLKIIEQLPSAKESPDKFLEVCTWVDQIAALNDSKTRKTTSETVRAVLD

SEQ ID NO: 186 - protein, 147 aa, Artificial Sequence
  Synthesized
KEFLLYLAGFVDGDGSIYASIKPYQTLKFKHYLFLEFRVYQKTQRRWFLDKLVDEIGVGHVYDTGSVSEYRLSEIKPLHNFLTQLQPFLKLKQKQANLVLKIIEQLPSAKESPDKFLEVCTWVDQIAALNDSKTRKTTSETVRAVLD

SEQ ID NO: 187 - protein, 147 aa, Artificial Sequence
  Synthesized
KEFLLYLAGFVDGDGSIYASIKPSQALKFKHSLALEFRVFQKTQRRWFLDKLVDEIGVGHVYDTGSVSDYRLSEIKPLHNFLTQLQPFLKLKQKQANLVLKIIEQLPSAKESPDKFLEVCTWVDQIAALNDSKTRKTTSETVRAVLD

SEQ ID NO: 188 - protein, 147 aa, Artificial Sequence
  Synthesized
KEFLLYLAGFVDGDGSIYAIIKPCQALKFKHTLQLEFRVSQKTQRRWFLDKLVDEIGVGHVYDFGSVSEYRLSEIKPLHNFLTQLQPFLKLKQKQANLVLKIIEQLPSAKESPDKFLEVCTWVDQIAALNDSKTRKTTSETVRAVLD

SEQ ID NO: 189 - protein, 147 aa, Artificial Sequence
  Synthesized
KEFLLYLAGFVDGDGSIYASIKPRQDLKFKHCLFLEFRVSQKTQRRWFLDKLVDEIGVGHVYDTGSVSDYRLSEIKPLHNFLTQLQPFLKLKQKQANLVLKIIEQLPSAKESPDKFLEVCTWVDQIAALNDSKTRKTTSETVRAVLD

SEQ ID NO: 190 - protein, 147 aa, Artificial Sequence
  Synthesized
KEFLLYLAGFVDGDGSIYACIKPDQCLKFKHYLSLEFRVFQKTQRRWFLDKLVDEIGVGHVYDNGSVSDYRLSEIKPLHNFLTQLQPFLKLKQKQANLVLKIIEQLPSAKESPDKFLEVCTWVDQIAALNDSKTRKTTSETVRAVLD

SEQ ID NO: 191 - protein, 147 aa, Artificial Sequence
  Synthesized
KEFLLYLAGFVDGDGSIYASIKPHQGLKFKHQLALEFRVSQKTQRRWFLDKLVDEIGVGHVYDHGSVSDYRLSEIKPLHNFLTQLQPFLKLKQKQANLVLKIIEQLPSAKESPDKFLEVCTWVDQIAALNDSKTRKTTSETVRAVLD

SEQ ID NO: 192 - protein, 147 aa, Artificial Sequence
  Synthesized
KEFLLYLAGFVDGDGSIYAVIKPSQHLKFKHYLTLEFRVSQKTQRRWFLDKLVDEIGVGHVYDMGSVSEYRLSEIKPLHNFLTQLQPFLKLKQKQANLVLKIIEQLPSAKESPDKFLEVCTWVDQIAALNDSKTRKTTSETVRAVLD

SEQ ID NO: 193 - protein, 147 aa, Artificial Sequence
  Synthesized
KEFLLYLAGFVDGDGSIYASIKPRQRLKFKHQLFLEFRVTQKTQRRWFLDKLVDEIGVGHVYDHGSVSEYRLSEIKPLHNFLTQLQPFLKLKQKQANLVLKIIEQLPSAKESPDKFLEVCTWVDQIAALNDSKTRKTTSETVRAVLD

SEQ ID NO: 194 - protein, 147 aa, Artificial Sequence
  Synthesized
KEFLLYLAGFVDGDGSIYATIKPRQNLKFKHQLLLEFRVSQKTQRRWFLDKLVDEIGVGHVYDIGSVSEYRLSEIKPLHNFLTQLQPFLKLKQKQANLVLKIIEQLPSAKESPDKFLEVCTWVDQIAALNDSKTRKTTSETVRAVLD

SEQ ID NO: 195 - protein, 147 aa, Artificial Sequence
  Synthesized
KEFLLYLAGFVDGDGSIYAMIKPGQSLKFKHYLSLEFRVVQKTQRRWFLDKLVDEIGVGHVYDAGSVSYYRLSEIKPLHNFLTQLQPFLKLKQKQANLVLKIIEQLPSAKESPDKFLEVCTWVDQIAALNDSKTRKTTSETVRAVLD

SEQ ID NO: 196 - protein, 147 aa, Artificial Sequence
  Synthesized
KEFLLYLAGFVDGDGSIYATIKPQQTLKFKHSLRLEFRVHQKTQRRWFLDKLVDEIGVGHVYDAGSVSDYRLSEIKPLHNFLTQLQPFLKLKQKQANLVLKIIEQLPSAKESPDKFLEVCTWVDQIAALNDSKTRKTTSETVRAVLD

SEQ ID NO: 197 - protein, 147 aa, Artificial Sequence
  Synthesized
KEFLLYLAGFVDGDGSIYATIKPRQRLKFKHYLFLEFRVTQKTQRRWFLDKLVDEIGVGHVYDHGSVSDYRLSEIKPLHNFLTQLQPFLKLKQKQANLVLKIIEQLPSAKESPDKFLEVCTWVDQIAALNDSKTRKTTSETVRAVLD

SEQ ID NO: 198 - protein, 147 aa, Artificial Sequence
  Synthesized
KEFLLYLAGFVDGDGSIYASIKPGQNLKFKHNLFLEFRVSQKTQRRWFLDKLVDEIGVGHVYDAGSVSDYRLSEIKPLHNFLTQLQPFLKLKQKQANLVLKIIEQLPSAKESPDKFLEVCTWVDQIAALNDSKTRKTTSETVRAVLD

SEQ ID NO: 199 - protein, 147 aa, Artificial Sequence
  Synthesized
KEFLLYLAGFVDGDGSIYAQIKPGQYLKFKHQLFLEFRVTQKTQRRWFLDKLVDEIGVGHVYDQGSVSDYRLSEIKPLHNFLTQLQPFLKLKQKQANLVLKIIEQLPSAKESPDKFLEVCTWVDQIAALNDSKTRKTTSETVRAVLD

SEQ ID NO: 200 - protein, 147 aa, Artificial Sequence
  Synthesized
KEFLLYLAGFVDGDGSIYACIKPLQLLKFKHQLRLEFRVYQKTQRRWFLDKLVDEIGVGHVYDNGSVSEYRLSEIKPLHNFLTQLQPFLKLKQKQANLVLKIIEQLPSAKESPDKFLEVCTWVDQIAALNDSKTRKTTSETVRAVLD

SEQ ID NO: 201 - protein, 147 aa, Artificial Sequence
  Synthesized
KEFLLYLAGFVDGDGSIYAMIKPAQRLKFKHQLFLEFRVTQKTQRRWFLDKLVDEIGVGHVYDTGSVSDYRLSEIKPLHNFLTQLQPFLKLKQKQANLVLKIIEQLPSAKESPDKFLEVCTWVDQIAALNDSKTRKTTSETVRAVLD

SEQ ID NO: 202 - protein, 147 aa, Artificial Sequence
  Synthesized
KEFLLYLAGFVDGDGSIYAGIKPRQELKFKHCLNLEFRVSQKTQRRWFLDKLVDEIGVGHVYDSGSVSEYRLSEIKPLHNFLTQLQPFLKLKQKQANLVLKIIEQLPSAKESPDKFLEVCTWVDQIAALNDSKTRKTTSETVRAVLD

SEQ ID NO: 203 - protein, 147 aa, Artificial Sequence
  Synthesized
KEFLLYLAGFVDGDGSIYASIKPQQGLKFKHQLSLEFRVYQKTQRRWFLDKLVDEIGVGHVYDTGSVSEYRLSEIKPLHNFLTQLQPFLKLKQKQANLVLKIIEQLPSAKESPDKFLEVCTWVDQIAALNDSKTRKTTSETVRAVLD

SEQ ID NO: 204 - protein, 147 aa, Artificial Sequence
  Synthesized
KEFLLYLAGFVDGDGSIYAAIKPQQGLKFKHRLALEFRVSQKTQRRWFLDKLVDEIGVGHVYDAGSVSEYRLSEIKPLHNFLTQLQPFLKLKQKQANLVLKIIEQLPSAKESPDKFLEVCTWVDQIAALNDSKTRKTTSETVRAVLD

SEQ ID NO: 205 - protein, 147 aa, Artificial Sequence
  Synthesized
KEFLLYLAGFVDGDGSIYAVIKPQQHLKFKHQLFLEFRVSQKTQRRWFLDKLVDEIGVGHVYDSGSVSEYRLSEIKPLHNFLTQLQPFLKLKQKQANLVLKIIEQLPSAKESPDKFLEVCTWVDQIAALNDSKTRKTTSETVRAVLD

SEQ ID NO: 206 - protein, 147 aa, Artificial Sequence
  Synthesized
KEFLLYLAGFVDGDGSIYAKIKPQQSLKFKHYLNLEFRVTQKTQRRWFLDKLVDEIGVGHVYDCGSVSDYRLSEIKPLHNFLTQLQPFLKLKQKQANLVLKIIEQLPSAKESPDKFLEVCTWVDQIAALNDSKTRKTTSETVRAVLD

SEQ ID NO: 207 - protein, 147 aa, Artificial Sequence
  Synthesized
KEFLLYLAGFVDGDGSIYAAIKPVQTLKFKHKLFLEFRVYQKTQRRWFLDKLVDEIGVGHVYDSGSVSDYRLSEIKPLHNFLTQLQPFLKLKQKQANLVLKIIEQLPSAKESPDKFLEVCTWVDQIAALNDSKTRKTTSETVRAVLD

SEQ ID NO: 208 - protein, 147 aa, Artificial Sequence
  Synthesized
KEFLLYLAGFVDGDGSIYASIKPAQNLKFKHYLHLEFRVYQKTQRRWFLDKLVDEIGVGHVYDTGSVSNYRLSEIKPLHNFLTQLQPFLKLKQKQANLVLKIIEQLPSAKESPDKFLEVCTWVDQIAALNDSKTRKTTSETVRAVLD

SEQ ID NO: 209 - protein, 147 aa, Artificial Sequence
  Synthesized
KEFLLYLAGFVDGDGSIYASIKPGQCLKFKHALYLEFRVTQKTQRRWFLDKLVDEIGVGHVYDTGSVSDYRLSEIKPLHNFLTQLQPFLKLKQKQANLVLKIIEQLPSAKESPDKFLEVCTWVDQIAALNDSKTRKTTSETVRAVLD

SEQ ID NO: 210 - protein, 147 aa, Artificial Sequence
  Synthesized
KEFLLYLAGFVDGDGSIYACIKPLQRLKFKHFLSLEFRVSQKTQRRWFLDKLVDEIGVGHVYDYGSVSEYRLSEIKPLHNFLTQLQPFLKLKQKQANLVLKIIEQLPSAKESPDKFLEVCTWVDQIAALNDSKTRKTTSETVRAVLD

SEQ ID NO: 211 - protein, 147 aa, Artificial Sequence
  Synthesized
KEFLLYLAGFVDGDGSIYASIKPLQMLKFKHSLHLEFRVTQKTQRRWFLDKLVDEIGVGHVYDAGSVSDYRLSEIKPLHNFLTQLQPFLKLKQKQANLVLKIIEQLPSAKESPDKFLEVCTWVDQIAALNDSKTRKTTSETVRAVLD

SEQ ID NO: 212 - protein, 147 aa, Artificial Sequence
  Synthesized
KEFLLYLAGFVDGDGSIYASIKPRQALKFKHFLHLEFRVHQKTQRRWFLDKLVDEIGVGHVYDVGSVSEYRLSEIKPLHNFLTQLQPFLKLKQKQANLVLKIIEQLPSAKESPDKFLEVCTWVDQIAALNDSKTRKTTSETVRAVLD

SEQ ID NO: 213 - protein, 147 aa, Artificial Sequence
  Synthesized
KEFLLYLAGFVDGDGSIYATIKPGQWLKFKHYLSLEFRVSQKTQRRWFLDKLVDEIGVGHVYDAGSVSEYRLSEIKPLHNFLTQLQPFLKLKQKQANLVLKIIEQLPSAKESPDKFLEVCTWVDQIAALNDSKTRKTTSETVRAVLD

SEQ ID NO: 214 - protein, 147 aa, Artificial Sequence
  Synthesized
KEFLLYLAGFVDGDGSIYAGIKPRQRLKFKHQLLLEFRVSQKTQRRWFLDKLVDEIGVGHVYDAGSVSEYRLSEIKPLHNFLTQLQPFLKLKQKQANLVLKIIEQLPSAKESPDKFLEVCTWVDQIAALNDSKTRKTTSETVRAVLD

SEQ ID NO: 215 - protein, 147 aa, Artificial Sequence
  Synthesized
KEFLLYLAGFVDGDGSIYARIKPNQTLKFKHSLGLEFRVSQKTQRRWFLDKLVDEIGVGHVYDLGSVSDYRLSEIKPLHNFLTQLQPFLKLKQKQANLVLKIIEQLPSAKESPDKFLEVCTWVDQIAALNDSKTRKTTSETVRAVLD

SEQ ID NO: 216 - protein, 147 aa, Artificial Sequence
  Synthesized
KEFLLYLAGFVDGDGSIYAGIKPRQSLKFKHGLTLEFRVAQKTQRRWFLDKLVDEIGVGHVYDFGSVSEYRLSEIKPLHNFLTQLQPFLKLKQKQANLVLKIIEQLPSAKESPDKFLEVCTWVDQIAALNDSKTRKTTSETVRAVLD

SEQ ID NO: 217 - protein, 147 aa, Artificial Sequence
  Synthesized
KEFLLYLAGFVDGDGSIYASIKPMQCLKFKHQLLLSFKVSQKTQRRWFLDKLVDEIGVGYVYDYGSVSEYGLSQIKPLHNFLTQLQPFLKLKQKQANLVLKIIEQLPSAKESPDKFLEVCTWVDQIAALNDSKTRKTTSETVRAVLD

SEQ ID NO: 218 - protein, 147 aa, Artificial Sequence; identical to SEQ ID NO: 153
  Synthesized

SEQ ID NO: 219 - protein, 147 aa, Artificial Sequence
  Synthesized
KEFLLYLAGFVDGDGSIYATISPNQSCKFKHQLKLQFTVSQKTQRRWFLDKLVDEIGVGYVYDFGSVSQYGLSQIKPLHNFLTQLQPFLKLKQKQANLVLKIIEQLPSAKESPDKFLEVCTWVDQIAALNDSKTRKTTSETVRAVLD

SEQ ID NO: 220 - protein, 147 aa, Artificial Sequence; identical to SEQ ID NO: 153
  Synthesized

SEQ ID NO: 221 - protein, 147 aa, Artificial Sequence
  Synthesized
KEFLLYLAGFVDGDGSIYASIQPRQRSKFKHSLQLYFNVGQKTQRRWFLDKLVDEIGVGYVYDHGSVSEYRLSEIKPLHNFLTQLQPFLKLKQKQANLVLKIIEQLPSAKESPDKFLEVCTWVDQIAALNDSKTRKTTSETVRAVLD

SEQ ID NO: 222 - protein, 147 aa, Artificial Sequence
  Synthesized
KEFLLYLAGFVDGDGSIYASIQPRQHSKFKHSLQLYFNVGQKTQRRWFLDKLVDEIGVGYVYDHGSVSEYRLSEIKPLHNFLTQLQPFLKLKQKQANLVLKIIEQLPSAKESPDKFLEVCTWVDQIAALNDSKTRKTTSETVRAVLD

SEQ ID NO: 223 - protein, 147 aa, Artificial Sequence
  Synthesized
KEFLLYLAGFVDGDGSIYASIQPRQAAKFKHTLQLYFNVGQKTQRRWFLDKLVDEIGVGYVYDHGSVSEYRLSEIKPLHNFLTQLQPFLKLKQKQANLVLKIIEQLPSAKESPDKFLEVCTWVDQIAALNDSKTRKTTSETVRAVLD

SEQ ID NO: 224 - protein, 147 aa, Artificial Sequence; identical to SEQ ID NO: 222
  Synthesized

SEQ ID NO: 225 - protein, 147 aa, Artificial Sequence; identical to SEQ ID NO: 223
  Synthesized

SEQ ID NO: 226 - protein, 147 aa, Artificial Sequence
  Synthesized
KEFLLYLAGFVDGDGSIYASIRPQQSAKFKHNLQLYFNVGQKTQRRWFLDKLVDEIGVGYVYDHGSVSEYRLSQIKPLHNFLTQLQPFLKLKQKQANLVLKIIEQLPSAKESPDKFLEVCTWVDQIAALNDSKTRKTTSETVRAVLD

SEQ ID NO: 227 - protein, 147 aa, Artificial Sequence; identical to SEQ ID NO: 226
  Synthesized

SEQ ID NO: 228 - protein, 147 aa, Artificial Sequence
  Synthesized
KEFLLYLAGFVDGDGSIYASIRPQQSAKFKHNLQLYFNVGQKTQRRWFLDKLVDEIGVGYVYDHGSVSEYRLSEIKPLHNFLTQLQPFLKLKQKQANLVLKIIEQLPSAKESPDKFLEVCTWVDQIAALNDSKTRKTTSETVRAVLD

SEQ ID NO: 229 - protein, 147 aa, Artificial Sequence; identical to SEQ ID NO: 228
  Synthesized

SEQ ID NO: 230 - protein, 147 aa, Artificial Sequence; identical to SEQ ID NO: 226
  Synthesized

SEQ ID NO: 231 - protein, 147 aa, Artificial Sequence
  Synthesized
KEFLLYLAGFVDGDGSIYASIRPQQSAKFKHNLQLYFNVGQKTQRRWFLDKLVDEIGVGKVYDHGSVSEYRLSQIKPLHNFLTQLQPFLKLKQKQANLVLKIIEQLPSAKESPDKFLEVCTWVDQIAALNDSKTRKTTSETVRAVLD

SEQ ID NO: 232 - protein, 147 aa, Artificial Sequence
  Synthesized
KEFLLYLAGFVDGDGSIYASIRPQQSAKFKHNLQLYFNVGQKTQRRWFLDKLVDEIGVGRVYDHGSVSEYRLSQIKPLHNFLTQLQPFLKLKQKQANLVLKIIEQLPSAKESPDKFLEVCTWVDQIAALNDSKTRKTTSETVRAVLD

SEQ ID NO: 233 - protein, 147 aa, Artificial Sequence; identical to SEQ ID NO: 228
  Synthesized

SEQ ID NO: 234 - protein, 147 aa, Artificial Sequence
  Synthesized
KEFLLYLAGFVDGDGSIYASIRPQQSAKFKHNLQLYFNVGQKTQRRWFLDKLVDEIGVGKVYDHGSVSEYRLSEIKPLHNFLTQLQPFLKLKQKQANLVLKIIEQLPSAKESPDKFLEVCTWVDQIAALNDSKTRKTTSETVRAVLD

SEQ ID NO: 235 - protein, 147 aa, Artificial Sequence
  Synthesized
KEFLLYLAGFVDGDGSIYASIRPQQSAKFKHNLQLYFNVGQKTQRRWFLDKLVDEIGVGRVYDHGSVSEYRLSEIKPLHNFLTQLQPFLKLKQKQANLVLKIIEQLPSAKESPDKFLEVCTWVDQIAALNDSKTRKTTSETVRAVLD

SEQ ID NO: 236 - protein, 147 aa, Artificial Sequence; identical to SEQ ID NO: 226
  Synthesized

SEQ ID NO: 237 - protein, 147 aa, Artificial Sequence; identical to SEQ ID NO: 234
  Synthesized

SEQ ID NO: 238 - protein, 147 aa, Artificial Sequence; identical to SEQ ID NO: 235
  Synthesized

SEQ ID NO: 239 - protein, 147 aa, Artificial Sequence
  Synthesized
KEFLLYLAGFVDGDGSIYASIIPKQGMKFKHALSLGFSVAQKTQRRWFLDKLVDEIGVGYVRDAGSVSEYRLSEIKPLHNFLTQLQPFLKLKQKQANLVLKIIEQLPSAKESPDKFLEVCTWVDQIAALNDSKTRKTTSETVRAVLD

SEQ ID NO: 240 - protein, 147 aa, Artificial Sequence
  Synthesized
KEFLLYLAGFVDGDGSIYACICPLQRSKFKHTLQLRFEVGQKTQRRWFLDKLVDEIGVGYVYDSGSVSRYILSQIKPLHNFLTQLQPFLKLKQKQANLVLKIIEQLPSAKESPDKFLEVCTWVDQIAALNDSKTRKTTSETVRAVLD

SEQ ID NO: 241 - protein, 147 aa, Artificial Sequence
  Synthesized
KEFLLYLAGFVDGDGSIYASITPRQRGKFKHTLNLVFSVGQKTQRRWFLDKLVDEIGVGYVVDHGSVSEYRLSEIKPLHNFLTQLQPFLKLKQKQANLVLKIIEQLPSAKESPDKFLEVCTWVDQIAALNDSKTRKTTSETVRAVLD

SEQ ID NO: 242 - protein, 147 aa, Artificial Sequence
  Synthesized
KEFLLYLAGFVDGDGSIYATINPVQKAKFKHGLDLKFAVGQKTQRRWFLDKLVDEIGVGYVIDHGSVSEYRLSEIKPLHNFLTQLQPFLKLKQKQANLVLKIIEQLPSAKESPDKFLEVCTWVDQIAALNDSKTRKTTSETVRAVLD

SEQ ID NO: 243 - protein, 147 aa, Artificial Sequence
  Synthesized
KEFLLYLAGFVDGDGSIYATIDPRQRCKFKHSLSLRFEVGQKTQRRWFLDKLVDEIGVGYVYDFGSVSRYILSQIKPLHNFLTQLQPFLKLKQKQANLVLKIIEQLPSAKESPDKFLEVCTWVDQIAALNDSKTRKTTSETVRAVLD

SEQ ID NO: 244 - protein, 147 aa, Artificial Sequence
  Synthesized
KEFLLYLAGFVDGDGSIYATITPRQPSKFKHSLDLRFEVGQKTQRRWFLDKLVDEIGVGYVYDLGSVSIYRLSEIKPLHNFLTQLQPFLKLKQKQANLVLKIIEQLPSAKESPDKFLEVCTWVDQIAALNDSKTRKTTSETVRAVLD

SEQ ID NO: 245 - protein, 147 aa, Artificial Sequence; identical to SEQ ID NO: 243
  Synthesized

SEQ ID NO: 246 - protein, 147 aa, Artificial Sequence
  Synthesized
KEFLLYLAGFVDGDGSIYASIFPKQHCKFKHALQLYFNVGQKTQRRWFLDKLVDEIGVGYVYDHGSVSEYRLSEIKPLHNFLTQLQPFLKLKQKQANLVLKIIEQLPSAKESPDKFLEVCTWVDQIAALNDSKTRKTTSETVRAVLD

SEQ ID NO: 247 - protein, 147 aa, Artificial Sequence
  Synthesized
KEFLLYLAGFVDGDGSIYASIQPRQNMKFKHSLQLYFNVGQKTQRRWFLDKLVDEIGVGYVYDHGSVSEYRLSEIKPLHNFLTQLQPFLKLKQKQANLVLKIIEQLPSAKESPDKFLEVCTWVDQIAALNDSKTRKTTSETVRAVLD

SEQ ID NO: 248 - protein, 147 aa, Artificial Sequence
  Synthesized
KEFLLYLAGFVDGDGSIYASIQPRQHAKFKHSLQLYFNVGQKTQRRWFLDKLVDEIGVGYVYDHGSVSEYRLSEIKPLHNFLTQLQPFLKLKQKQANLVLKIIEQLPSAKESPDKFLEVCTWVDQIAALNDSKTRKTTSETVRAVLD

SEQ ID NO: 249 - protein, 147 aa, Artificial Sequence
  Synthesized
KEFLLYLAGFVDGDGSIYASIQPRQAAKFKHSLQLYFNVGQKTQRRWFLDKLVDEIGVGYVYDHGSVSEYRLSEIKPLHNFLTQLQPFLKLKQKQANLVLKIIEQLPSAKESPDKFLEVCTWVDQIAALNDSKTRKTTSETVRAVLD

SEQ ID NO: 250 - protein, 147 aa, Artificial Sequence
  Synthesized
KEFLLYLAGFVDGDGSIYASISPRQAMKFKHSLQLYFNVGQKTQRRWFLDKLVDEIGVGYVYDHGSVSEYRLSEIKPLHNFLTQLQPFLKLKQKQANLVLKIIEQLPSAKESPDKFLEVCTWVDQIAALNDSKTRKTTSETVRAVLD

SEQ ID NO: 251 - protein, 147 aa, Artificial Sequence
  Synthesized
KEFLLYLAGFVDGDGSIYASIQPRQLAKFKHSLQLYFNVGQKTQRRWFLDKLVDEIGVGYVYDHGSVSEYRLSEIKPLHNFLTQLQPFLKLKQKQANLVLKIIEQLPSAKESPDKFLEVCTWVDQIAALNDSKTRKTTSETVRAVLD

SEQ ID NO: 252 - protein, 147 aa, Artificial Sequence
  Synthesized
KEFLLYLAGFVDGDGSIYASIVPKQRMKFKHALYLRFNVGQKTQRRWFLDKLVDEIGVGYVYDHGSVSEYRLSEIKPLHNFLTQLQPFLKLKQKQANLVLKIIEQLPSAKESPDKFLEVCTWVDQIAALNDSKTRKTTSETVRAVLD

SEQ ID NO: 253 - protein, 147 aa, Artificial Sequence
  Synthesized
KEFLLYLAGFVDGDGSIYASITPRQSMKFKHSLQLYFNVGQKTQRRWFLDKLVDEIGVGYVYDHGSVSEYRLSEIKPLHNFLTQLQPFLKLKQKQANLVLKIIEQLPSAKESPDKFLEVCTWVDQIAALNDSKTRKTTSETVRAVLD

SEQ ID NO: 254 - protein, 147 aa, Artificial Sequence
  Synthesized
KEFLLYLAGFVDGDGSIYASIVPNQRSKFKHFLILAFNVGQKTQRRWFLDKLVDEIGVGYVYDHGSVSEYRLSEIKPLHNFLTQLQPFLKLKQKQANLVLKIIEQLPSAKESPDKFLEVCTWVDQIAALNDSKTRKTTSETVRAVLD

SEQ ID NO: 255 - protein, 147 aa, Artificial Sequence
  Synthesized
KEFLLYLAGFVDGDGSIYASITPRQTMKFKHSLQLYFNVGQKTQRRWFLDKLVDEIGVGYVYDHGSVSEYRLSEIKPLHNFLTQLQPFLKLKQKQANLVLKIIEQLPSAKESPDKFLEVCTWVDQIAALNDSKTRKTTSETVRAVLD

SEQ ID NO: 256 - protein, 147 aa, Artificial Sequence
  Synthesized
KEFLLYLAGFVDGDGSIYASIQPRQLSKFKHSLQLYFNVGQKTQRRWFLDKLVDEIGVGYVYDHGSVSEYRLSEIKPLHNFLTQLQPFLKLKQKQANLVLKIIEQLPSAKESPDKFLEVCTWVDQIAALNDSKTRKTTSETVRAVLD

SEQ ID NO: 257 - protein, 147 aa, Artificial Sequence
  Synthesized
KEFLLYLAGFVDGDGSIYASIQPRQRSKFKHTLQLYFNVGQKTQRRWFLDKLVDEIGVGYVYDHGSVSEYRLSEIKPLHNFLTQLQPFLKLKQKQANLVLKIIEQLPSAKESPDKFLEVCTWVDQIAALNDSKTRKTTSETVRAVLD

SEQ ID NO: 258 - protein, 147 aa, Artificial Sequence; identical to SEQ ID NO: 249
  Synthesized

SEQ ID NO: 259 - protein, 147 aa, Artificial Sequence
  Synthesized
KEFLLYLAGFVDGDGSIYASIQPRQPAKFKHSLQLYFNVGQKTQRRWFLDKLVDEIGVGYVYDHGSVSEYRLSEIKPLHNFLTQLQPFLKLKQKQANLVLKIIEQLPSAKESPDKFLEVCTWVDQIAALNDSKTRKTTSETVRAVLD

SEQ ID NO: 260 - protein, 147 aa, Artificial Sequence
  Synthesized
KEFLLYLAGFVDGDGSIYASINPRQNSKFKHFLQLYFNVGQKTQRRWFLDKLVDEIGVGYVYDHGSVSEYRLSEIKPLHNFLTQLQPFLKLKQKQANLVLKIIEQLPSAKESPDKFLEVCTWVDQIAALNDSKTRKTTSETVRAVLD

SEQ ID NO: 261 - protein, 147 aa, Artificial Sequence
  Synthesized
KEFLLYLAGFVDGDGSIYASINPKQGCKFKHALQLYFNVGQKTQRRWFLDKLVDEIGVGYVYDHGSVSEYRLSEIKPLHNFLTQLQPFLKLKQKQANLVLKIIEQLPSAKESPDKFLEVCTWVDQIAALNDSKTRKTTSETVRAVLD

SEQ ID NO: 262 - protein, 147 aa, Artificial Sequence
  Synthesized
KEFLLYLAGFVDGDGSIYASIQPKQRAKFKHSLQLYFNVGQKTQRRWFLDKLVDEIGVGYVYDHGSVSEYRLSEIKPLHNFLTQLQPFLKLKQKQANLVLKIIEQLPSAKESPDKFLEVCTWVDQIAALNDSKTRKTTSETVRAVLD

SEQ ID NO: 263 - protein, 147 aa, Artificial Sequence
  Synthesized
KEFLLYLAGFVDGDGSIYASIQPRQCSKFKHSLQLYFNVGQKTQRRWFLDKLVDEIGVGYVYDHGSVSEYRLSEIKPLHNFLTQLQPFLKLKQKQANLVLKIIEQLPSAKESPDKFLEVCTWVDQIAALNDSKTRKTTSETVRAVLD

SEQ ID NO: 264 - protein, 147 aa, Artificial Sequence
  Synthesized
KEFLLYLAGFVDGDGSIYASIQPRQRAKFKHSLQLYFNVGQKTQRRWFLDKLVDEIGVGYVYDHGSVSEYRLSEIKPLHNFLTQLQPFLKLKQKQANLVLKIIEQLPSAKESPDKFLEVCTWVDQIAALNDSKTRKTTSETVRAVLD

SEQ ID NO: 265 - protein, 147 aa, Artificial Sequence; identical to SEQ ID NO: 223
  Synthesized

SEQ ID NO: 266 - protein, 147 aa, Artificial Sequence; identical to SEQ ID NO: 221
  Synthesized

SEQ ID NO: 267 - protein, 147 aa, Artificial Sequence; identical to SEQ ID NO: 222
  Synthesized

SEQ ID NO: 268 - protein, 147 aa, Artificial Sequence; identical to SEQ ID NO: 222
  Synthesized

SEQ ID NO: 269 - protein, 147 aa, Artificial Sequence; identical to SEQ ID NO: 222
  Synthesized

SEQ ID NO: 270 - protein, 147 aa, Artificial Sequence; identical to SEQ ID NO: 222
  Synthesized

SEQ ID NO: 271 - protein, 147 aa, Artificial Sequence; identical to SEQ ID NO: 222
  Synthesized

SEQ ID NO: 272 - protein, 147 aa, Artificial Sequence; identical to SEQ ID NO: 222
  Synthesized

SEQ ID NO: 273 - protein, 147 aa, Artificial Sequence; identical to SEQ ID NO: 222
  Synthesized

SEQ ID NO: 274 - protein, 147 aa, Artificial Sequence; identical to SEQ ID NO: 222
  Synthesized

SEQ ID NO: 275 - protein, 147 aa, Artificial Sequence; identical to SEQ ID NO: 222
  Synthesized

SEQ ID NO: 276 - protein, 147 aa, Artificial Sequence; identical to SEQ ID NO: 222
  Synthesized

SEQ ID NO: 277 - protein, 147 aa, Artificial Sequence; identical to SEQ ID NO: 222
  Synthesized

SEQ ID NO: 278 - protein, 147 aa, Artificial Sequence; identical to SEQ ID NO: 222
  Synthesized

SEQ ID NO: 279 - protein, 147 aa, Artificial Sequence; identical to SEQ ID NO: 222
  Synthesized

SEQ ID NO: 280 - protein, 147 aa, Artificial Sequence; identical to SEQ ID NO: 222
  Synthesized

SEQ ID NO: 281 - protein, 147 aa, Artificial Sequence; identical to SEQ ID NO: 222
  Synthesized

SEQ ID NO: 282 - protein, 147 aa, Artificial Sequence; identical to SEQ ID NO: 222
  Synthesized

SEQ ID NO: 283 - protein, 147 aa, Artificial Sequence; identical to SEQ ID NO: 222
  Synthesized

SEQ ID NO: 284 - protein, 147 aa, Artificial Sequence; identical to SEQ ID NO: 222
  Synthesized

SEQ ID NO: 285 - protein, 147 aa, Artificial Sequence; identical to SEQ ID NO: 222
  Synthesized

SEQ ID NO: 286 - protein, 147 aa, Artificial Sequence; identical to SEQ ID NO: 223
  Synthesized

SEQ ID NO: 287 - protein, 147 aa, Artificial Sequence; identical to SEQ ID NO: 223
  Synthesized

SEQ ID NO: 288 - protein, 147 aa, Artificial Sequence; identical to SEQ ID NO: 223
  Synthesized

SEQ ID NO: 289 - protein, 147 aa, Artificial Sequence; identical to SEQ ID NO: 223
  Synthesized

SEQ ID NO: 290 - protein, 147 aa, Artificial Sequence; identical to SEQ ID NO: 223
  Synthesized

SEQ ID NO: 291 - protein, 147 aa, Artificial Sequence; identical to SEQ ID NO: 223
  Synthesized

SEQ ID NO: 292 - protein, 147 aa, Artificial Sequence; identical to SEQ ID NO: 223
  Synthesized

SEQ ID NO: 293 - protein, 147 aa, Artificial Sequence; identical to SEQ ID NO: 223
  Synthesized

SEQ ID NO: 294 - protein, 147 aa, Artificial Sequence; identical to SEQ ID NO: 223
  Synthesized

SEQ ID NO: 295 - protein, 147 aa, Artificial Sequence; identical to SEQ ID NO: 223
  Synthesized

SEQ ID NO: 296 - protein, 147 aa, Artificial Sequence; identical to SEQ ID NO: 223
  Synthesized

SEQ ID NO: 297 - protein, 147 aa, Artificial Sequence; identical to SEQ ID NO: 223
  Synthesized

SEQ ID NO: 298 - protein, 147 aa, Artificial Sequence; identical to SEQ ID NO: 223
  Synthesized

SEQ ID NO: 299 - protein, 147 aa, Artificial Sequence; identical to SEQ ID NO: 221
  Synthesized

SEQ ID NO: 300 - protein, 147 aa, Artificial Sequence; identical to SEQ ID NO: 221
  Synthesized

SEQ ID NO: 301 - protein, 147 aa, Artificial Sequence; identical to SEQ ID NO: 221
  Synthesized

SEQ ID NO: 302 - protein, 147 aa, Artificial Sequence; identical to SEQ ID NO: 221
  Synthesized

SEQ ID NO: 303 - protein, 147 aa, Artificial Sequence; identical to SEQ ID NO: 221
  Synthesized

SEQ ID NO: 304 - protein, 147 aa, Artificial Sequence; identical to SEQ ID NO: 221
  Synthesized

SEQ ID NO: 305 - protein, 147 aa, Artificial Sequence; identical to SEQ ID NO: 221
  Synthesized

SEQ ID NO: 306 - protein, 147 aa, Artificial Sequence
  Synthesized
KEFLLYLAGFVDGDGSIYATICPHQMAKFKHYLQLRFEVGQKTQRRWFLDKLVDEIGVGYVTDHGSVSRYILSQIKPLHNFLTQLQPFLKLKQKQANLVLKIIEQLPSAKESPDKFLEVCTWVDQIAALNDSKTRKTTSETVRAVLD

SEQ ID NO: 307 - protein, 147 aa, Artificial Sequence
  Synthesized
KEFLLYLAGFVDGDGSIYASICPKQGAKFKHFLILCFEVGQKTQRRWFLDKLVDEIGVGYVYDQGSVSIYRLSQIKPLHNFLTQLQPFLKLKQKQANLVLKIIEQLPSAKESPDKFLEVCTWVDQIAALNDSKTRKTTSETVRAVLD

SEQ ID NO: 308 - protein, 147 aa, Artificial Sequence
  Synthesized
KEFLLYLAGFVDGDGSIYATITPRQTAKFKHSLSLKFEVGQKTQRRWFLDKLVDEIGVGYVTDCGSVSRYILSQIKPLHNFLTQLQPFLKLKQKQANLVLKIIEQLPSAKESPDKFLEVCTWVDQIAALNDSKTRKTTSETVRAVLD

SEQ ID NO: 309 - protein, 147 aa, Artificial Sequence
  Synthesized
KEFLLYLAGFVDGDGSIYASIFPRQLMKFKHELQLNFSVSQKTQRRWFLDKLVDEIGVGYVIDHGSVSEYRLSEIKPLHNFLTQLQPFLKLKQKQANLVLKIIEQLPSAKESPDKFLEVCTWVDQIAALNDSKTRKTTSETVRAVLD

SEQ ID NO: 310 - protein, 147 aa, Artificial Sequence
  Synthesized
KEFLLYLAGFVDGDGSIYATIHPEQSVKFKHRLRLRFAVTQKTQRRWFLDKLVDEIGVGYVYDRGSVSDYILSEIKPLHNFLTQLQPFLKLKQKQANLVLKIIEQLPSAKESPDKFLEVCTWVDQIAALNDSKTRKTTSETVRAVLD

SEQ ID NO: 311 - protein, 147 aa, Artificial Sequence
  Synthesized
KEFLLYLAGFVDGDGSIYACIEPNQGYKFKHVLRLRFVVSQKTQRRWFLDKLVDEIGVGYVYDRGSVSDYILSEIKPLHNFLTQLQPFLKLKQKQANLVLKIIEQLPSAKESPDKFLEVCTWVDQIAALNDSKTRKTTSETVRAVLD

SEQ ID NO: 312 - protein, 147 aa, Artificial Sequence; identical to SEQ ID NO: 310
  Synthesized

SEQ ID NO: 313 - protein, 147 aa, Artificial Sequence
  Synthesized
KEFLLYLAGFVDGDGSIYASIVPVQWGKFKHRLRLWFNVSQKTQRRWFLDKLVDEIGVGYVRDRGSVSDYRLSEIKPLHNFLTQLQPFLKLKQKQANLVLKIIEQLPSAKESPDKFLEVCTWVDQIAALNDSKTRKTTSETVRAVLD

SEQ ID NO: 314 - protein, 147 aa, Artificial Sequence
  Synthesized
KEFLLYLAGFVDGDGSIYAVIAPHQTLKFKHTLKLCFNVSQKTQRRWFLDKLVDEIGVGYVRDRGSVSDYRLSQIKPLHNFLTQLQPFLKLKQKQANLVLKIIEQLPSAKESPDKFLEVCTWVDQIAALNDSKTRKTTSETVRAVLD

SEQ ID NO: 315 - protein, 147 aa, Artificial Sequence
  Synthesized
KEFLLYLAGFVDGDGSIYASIVPVQWGKFKHRLRLWFNVSQKTQRRWFLDKLVDEIGVGYVRDRGSVSDYRLSQIKPLHNFLTQLQPFLKLKQKQANLVLKIIEQLPSAKESPDKFLEVCTWVDQIAALNDSKTRKTTSETVRAVLD

SEQ ID NO: 316 - protein, 147 aa, Artificial Sequence; identical to SEQ ID NO: 313
  Synthesized

SEQ ID NO: 317 - protein, 147 aa, Artificial Sequence; identical to SEQ ID NO: 313
  Synthesized

SEQ ID NO: 318 - protein, 147 aa, Artificial Sequence; identical to SEQ ID NO: 314
  Synthesized

SEQ ID NO: 319 - protein, 147 aa, Artificial Sequence; identical to SEQ ID NO: 310
  Synthesized

SEQ ID NO: 320 - protein, 147 aa, Artificial Sequence; identical to SEQ ID NO: 315
  Synthesized

SEQ ID NO: 321 - protein, 147 aa, Artificial Sequence; identical to SEQ ID NO: 314
  Synthesized

SEQ ID NO: 322 - protein, 147 aa, Artificial Sequence; identical to SEQ ID NO: 314
  Synthesized

SEQ ID NO: 323 - protein, 147 aa, Artificial Sequence
  Synthesized
KEFLLYLAGFVDGDGSIYAQICPTQRMKFKHRLRLSFDVRQKTQRRWFLDKLVDEIGVGYVYDSGSVSSYRLSEIKPLHNFLTQLQPFLKLKQKQANLVLKIIEQLPSAKESPDKFLEVCTWVDQIAALNDSKTRKTTSETVRAVLD

SEQ ID NO: 324 - protein, 147 aa, Artificial Sequence; identical to SEQ ID NO: 314
  Synthesized

SEQ ID NO: 325 - protein, 147 aa, Artificial Sequence
  Synthesized
KEFLLYLAGFVDGDGSIYALICPAQSLKFKHGLRLAFRVRQKTQRRWFLDKLVDEIGVGYVWDQGSVSCYSLSEIKPLHNFLTQLQPFLKLKQKQANLVLKIIEQLPSAKESPDKFLEVCTWVDQIAALNDSKTRKTTSETVRAVLD

SEQ ID NO: 326 - protein, 147 aa, Artificial Sequence
  Synthesized
KEFLLYLAGFVDGDGSIYATIIPQQWGKFKHRLRLWFVVRQKTQRRWFLDKLVDEIGVGYVYDDGSVSSYVLSEIKPLHNFLTQLQPFLKLKQKQANLVLKIIEQLPSAKESPDKFLEVCTWVDQIAALNDSKTRKTTSETVRAVLD

SEQ ID NO: 327 - protein, 147 aa, Artificial Sequence
  Synthesized
KEFLLYLAGFVDGDGSIYACIEPNQGYKFKHRLRLWFVVRQKTQRRWFLDKLVDEIGVGYVYDDGSVSSYVLSQIKPLHNFLTQLQPFLKLKQKQANLVLKIIEQLPSAKESPDKFLEVCTWVDQIAALNDSKTRKTTSETVRAVLD

SEQ ID NO: 328 - protein, 147 aa, Artificial Sequence
  Synthesized
KEFLLYLAGFVDGDGSIYATIIPQQWGKFKHRLRLWFVVRQKTQRRWFLDKLVDEIGVGCVYGRGSVSSYVLSEIKPLHNFLTQLQPFLKLKQKQANLVLKIIEQLPSAKESPDKFLEVCTWVDQIAALNDSKTRKTTSETVRAVLD

SEQ ID NO: 329 - protein, 147 aa, Artificial Sequence; identical to SEQ ID NO: 326
  Synthesized

SEQ ID NO: 330 - protein, 147 aa, Artificial Sequence
  Synthesized
KEFLLYLAGFVDGDGSIFATIIPQQWGKFKHRLRLWFVVRQKTQRRWFLDKLVDEIGVGYVYDDGSVSSYVLSEIKPLHNFLTQLQPFLKLKQKQANLVLKIIEQLPSAKESPDKFLEVCTWVDQIAALNDSKTRKTTSETVRAVLD

SEQ ID NO: 331 - protein, 147 aa, Artificial Sequence
  Synthesized
KEFLLYLAGFVDGDGSIYATIIPQQWGKFKHRLRLWFVVRQKTQRRWFLDKLVDEIGVGCVYDDGSVSSYVLSQIKPLHNFLTQLQPFLKLKQKQANLVLKIIEQLPSAKESPDKFLEVCTWVDQIAALNDSKTRKTTSETVRAVLD

SEQ ID NO: 332 - protein, 147 aa, Artificial Sequence
  Synthesized
KEFLLYLAGFVDGDGSIYAVIAPHQTLKFKHTLKLCFNVSQKTQRRWFLDKLVDEIGVGYVRDRGSVSDYRLSEIKPLHNFLTQLQPFLKLKQKQANLVLKIIEQLPSAKESPDKFLEVCTWVDQIAALNDSKTRKTTSETVRAVLD

SEQ ID NO: 333 - protein, 147 aa, Artificial Sequence; identical to SEQ ID NO: 326
  Synthesized

SEQ ID NO: 334 - protein, 147 aa, Artificial Sequence
  Synthesized
KEFLLYLAGFVDGDGSIYATIIPQQWGKFKHRLRLWFVVRQKTQRRWFLDKLVDEIGVGCVYDDGSVSSYVLSEIKPLHNFLTQLQPFLKLKQKQANLVLKIIEQLPSAKESPDKFLEVCTWVDQIAALNDSKTRKTTSETVRAVLD

SEQ ID NO: 335 - protein, 147 aa, Artificial Sequence; identical to SEQ ID NO: 331
  Synthesized

SEQ ID NO: 336 - protein, 147 aa, Artificial Sequence
  Synthesized
KEFLLYLAGFVDGDGSIYATIHPRQDLKFKHVLRLRFSVFQKTQRRWFLDKLVDEIGVGYVYDAGSVSEYRLSEIKPLHNFLTQLQPFLKLKQKQANLVLKIIEQLPSAKESPDKFLEVCTWVDQIAALNDSKTRKTTSETVRAVLD

SEQ ID NO: 337 - protein, 147 aa, Artificial Sequence
  Synthesized
KEFLLYLAGFVDGDGSIFASIHPRQSAKFKHYLRLRFSVFQKTQRRWFLDKLVDEIGVGYVYDAGSVSEYRLSQIKPLHNFLTQLQPFLKLKQKQANLVLKIIEQLPSAKESPDKFLEVCTWVDQIAALNDSKTRKTTSETVRAVLD

SEQ ID NO: 338 - protein, 147 aa, Artificial Sequence
  Synthesized
KEFLLYLAGFVDGDGSIFATITPWQSLKFKHRLRLMFSVFQKTQRRWFLDKLVDEIGVGYVYDGGSVSEYRLSQIKPLHNFLTQLQPFLKLKQKQANLVLKIIEQLPSAKESPDKFLEVCTWVDQIAALNDSKTRKTTSETVRAVLD

SEQ ID NO: 339 - protein, 147 aa, Artificial Sequence
  Synthesized
KEFLLYLAGFVDGDGSIWAEIRPCQRSKFKHHLCLRFNVTQKTQRRWFLDKLVDEIGVGYVRDTGSVSQYNLSEIKPLHNFLTQLQPFLKLKQKQANLVLKIIEQLPSAKESPDKFLEVCTWVDQIAALNDSKTRKTTSETVRAVLD

SEQ ID NO: 340 - protein, 147 aa, Artificial Sequence
  Synthesized
KEFLLYLAGFVDGDGSIFATITPWQTLKFKHRLRLNFSVFQKTQRRWFLDKLVDEIGVGYVYDAGSVSEYRLSQIKPLHNFLTQLQPFLKLKQKQANLVLKIIEQLPSAKESPDKFLEVCTWVDQIAALNDSKTRKTTSETVRAVLD

SEQ ID NO: 341 - protein, 147 aa, Artificial Sequence
  Synthesized
KEFLLYLAGFVDGDGSIYATIHPRQDLKFKHVLRLRFSVFQKTQRRWFLDKLVDEIGVGYVYDAGSVSEYRLSQIKPLHNFLTQLQPFLKLKQKQANLVLKIIEQLPSAKESPDKFLEVCTWVDQIAALNDSKTRKTTSETVRAVLD

SEQ ID NO: 342 - protein, 147 aa, Artificial Sequence
  Synthesized
KEFLLYLAGFVDGDGSIYATIHPRQKVKFKHLLRLRFSVFQRTQRRWFLDKLVDEIGVGYVYDAGSVSEYRLSQIKPLHNFLTQLQPFLKLKQKQANLVLKIIEQLPSAKESPDKFLEVCTWVDQIAALNDSKTRKTTSETVRAVLD

SEQ ID NO: 343 - protein, 147 aa, Artificial Sequence
  Synthesized
KEFLLYLAGFVDGDGSIFASIHPRQTGKFKHFLRLRFNVCQKTQRRWFLDKLVDEIGVGYVYDTGSVSEYRLSQIKPLHNFLTQLQPFLKLKQKQANLVLKIIEQLPSAKESPDKFLEVCTWVDQIAALNDSKTRKTTSETVRAVLD

SEQ ID NO: 344 - protein, 147 aa, Artificial Sequence
  Synthesized
KEFLLYLAGFVDGDGSIFACIKPWQTLKFKHRLYLSFSVYQKTQRRWFLDKLVDEIGVGYVYDAGSVSEYRLSQIKPLHNFLTQLQPFLKLKQKQANLVLKIIEQLPSAKESPDKFLEVCTWVDQIAALNDSKTRKTTSETVRAVLD

SEQ ID NO: 345 - protein, 147 aa, Artificial Sequence; identical to SEQ ID NO: 337
  Synthesized

SEQ ID NO: 346 - protein, 147 aa, Artificial Sequence
  Synthesized
KEFLLYLAGFVDGDGSIYASIHPRQAAKFKHYLRLRFSVFQKTQRRWFLDKLVDEIGVGYVYDAGSVSEYRLSQIKPLHNFLTQLQPFLKLKQKQANLVLKIIEQLPSAKESPDKFLEVCTWVDQIAALNDSKTRKTTSETVRAVLD

SEQ ID NO: 347 - protein, 147 aa, Artificial Sequence
  Synthesized
KEFLLYLAGFVDGDGSIYACIAPCQRNKFKHQLSLRFDVFQKTQRRWFLDKLVDEIGVGYVNDSGSVSRYRLSQIKPLHNFLTQLQPFLKLKQKQANLVLKIIEQLPSAKESPDKFLEVCTWVDQIAALNDSKTRKTTSETVRAVLD

SEQ ID NO: 348 - protein, 147 aa, Artificial Sequence
  Synthesized
KEFLLYLAGFVDGDGSIYAEIRPGQIAKFKHTLTLHFAVYQKTQRRWFLDKLVDEIGVGYVSDSGSVSRYRLSQIKPLHNFLTQLQPFLKLKQKQANLVLKIIEQLPSAKESPDKFLEVCTWVDQIAALNDSKTRKTTSETVRAVLD

SEQ ID NO: 349 - protein, 147 aa, Artificial Sequence
  Synthesized
KEFLLYLAGFVDGDGSIYAEIRPHQNSKFKHQLVLRFEVYQKTQRRWFLDKLVDEIGVGYVNDGGSVSRYRLSQIKPLHNFLTQLQPFLKLKQKQANLVLKIIEQLPSAKESPDKFLEVCTWVDQIAALNDSKTRKTTSETVRAVLD

SEQ ID NO: 350 - protein, 147 aa, Artificial Sequence
  Synthesized
KEFLLYLAGFVDGDGSIFATITPWQSLKFKHRLRLMFSVFQKTQRRWFLDKLVDEIGVGYVYDGGSVSEYRLSEIKPLHNFLTQLQPFLKLKQKQANLVLKIIEQLPSAKESPDKFLEVCTWVDQIAALNDSKTRKTTSETVRAVLD

SEQ ID NO: 351 - protein, 147 aa, Artificial Sequence
  Synthesized
KEFLLYLAGFVDGDGSIYASITPTQLNKFKHQLGLCFQVTQKTQRRWFLDKLVDEIGVGYVTDSGSVSRYRLSEIKPLHNFLTQLQPFLKLKQKQANLVLKIIEQLPSAKESPDKFLEVCTWVDQIAALNDSKTRKTTSETVRAVLD

SEQ ID NO: 352 - protein, 147 aa, Artificial Sequence; identical to SEQ ID NO: 347
  Synthesized

SEQ ID NO: 353 - protein, 147 aa, Artificial Sequence
  Synthesized
KEFLLYLAGFVDGDGSIWAEIRPCQRSKFKHQLVLMFAVYQKTQRRWFLDKLVDEIGVGYVNDGGSVSRYRLSQIKPLHNFLTQLQPFLKLKQKQANLVLKIIEQLPSAKESPDKFLEVCTWVDQIAALNDSKTRKTTSETVRAVLD

SEQ ID NO: 354 - protein, 147 aa, Artificial Sequence
  Synthesized
KEFLLYLAGFVDGDGSIYACIQPMQNAKFKHHLSLHFQVTQKTQRRWFLDKLVDEIGVGYVSDSGSVSRYRLSEIKPLHNFLTQLQPFLKLKQKQANLVLKIIEQLPSAKESPDKFLEVCTWVDQIAALNDSKTRKTTSETVRAVLD

SEQ ID NO: 355 - protein, 147 aa, Artificial Sequence
  Synthesized
KEFLLYLAGFVDGDGSIYACIQPSQGSKFKHILALRFEVYQKTQRRWFLDKLVDEIGVGYVIDKGSVSRYRLSQIKPLHNFLTQLQPFLKLKQKQANLVLKIIEQLPSAKESPDKFLEVCTWVDQIAALNDSKTRKTTSETVRAVLD

SEQ ID NO: 356 - protein, 147 aa, Artificial Sequence
  Synthesized
KEFLLYLAGFVDGDGSIYACIQPDQRGKFKHTLSLRFEVFQKTQRRWFLDKLVDEIGVGYVNDSGSVSRYRLSQIKPLHNFLTQLQPFLKLKQKQANLVLKIIEQLPSAKESPDKFLEVCTWVDQIAALNDSKTRKTTSETVRAVLD

SEQ ID NO: 357 - protein, 147 aa, Artificial Sequence
  Synthesized
KEFLLYLAGFVDGDGSIYASILPQQEVKFKHTLQLRFEVYQKTQRRWFLDKLVDEIGVGYVNDSGSVSRYRLSQIKPLHNFLTQLQPFLKLKQKQANLVLKIIEQLPSAKESPDKFLEVCTWVDQIAALNDSKTRKTTSETVRAVLD

SEQ ID NO: 358 - protein, 147 aa, Artificial Sequence
  Synthesized
KEFLLYLAGFVDGDGSIYASIWPRQDCKFKHGLKLGFQVTQKTQRRWFLDKLVDEIGVGYVRDRGSVSDYALSQIKPLHNFLTQLQPFLKLKQKQANLVLKIIEQLPSAKESPDKFLEVCTWVDQIAALNDSKTRKTTSETVRAVLD

SEQ ID NO: 359 - protein, 147 aa, Artificial Sequence
  Synthesized
KEFLLYLAGFVDGDGSIFARIRPCQTCKFKHKLDLVFSVGQKTQRRWFLDKLVDEIGVGYVVDRGSVSEYNLSQIKPLHNFLTQLQPFLKLKQKQANLVLKIIEQLPSAKESPDKFLEVCTWVDQIAALNDSKTRKTTSETVRAVLD

SEQ ID NO: 360 - protein, 147 aa, Artificial Sequence
  Synthesized
KEFLLYLAGFVDGDGSIYASIWPRQDCKFKHGLKLGFQVTQKTQRRWFLDKLVDEIGVGYVRDRGSVSDYCLSEIKPLHNFLTQLQPFLKLKQKQANLVLKIIEQLPSAKESPDKFLEVCTWVDQIAALNDSKTRKTTSETVRAVLD

SEQ ID NO: 361 - protein, 147 aa, Artificial Sequence
  Synthesized
KEFLLYLAGFVDGDGSIFARIRPCQTCKFKHKLDLVFSVGQKTQRRWFLDKLVDEIGVGYVVDRGSVSEYILSQIKPLHNFLTQLQPFLKLKQKQANLVLKIIEQLPSAKESPDKFLEVCTWVDQIAALNDSKTRKTTSETVRAVLD

SEQ ID NO: 362 - DNA, 581 bp, Artificial Sequence
  Synthesized
cgcccctctccctcccccccctaacgttactggccgaagccgcttggaataaggccggtgtgcgtttgtctatatgttattttccaccatattgccgtcttttggcaatgtgagggcccggaaacctggccctgtcttcttgacgagcattcctaggggtctttcccctctcgccaaaggaatgcaaggtctgttgaatgtcgtgaaggaagcagttcctctggaagcttcttgaagacaaacaacgtctgtagcgaccctttgcaggcagcggaaccccccacctggcgacaggtgcctctgcggccaaaagccacgtgtataagatacacctgcaaaggcggcacaaccccagtgccacgttgtgagttggatagttgtggaaagagtcaaatggctctcctcaagcgtattcaacaaggggctgaaggatgcccagaaggtaccccattgtatgggatctgatctggggcctcggtgcacatgctttacatgtgtttagtcgaggttaaaaaaacgtctaggccccccgaaccacggggacgtggttttcctttgaaaaacacgatgataatatggcc

SEQ ID NO: 363 - DNA, 54 bp, Artificial Sequence
  Synthesized
gagggcagaggaagtctgctaacatgcggtgacgtcgaggagaatcctggacct

SEQ ID NO: 364 - DNA, 57 bp, Artificial Sequence
  Synthesized
gctactaacttcagcctgctgaagcaggctggagacgtggaggagaaccctggacct

SEQ ID NO: 365 - DNA, 60 bp, Artificial Sequence
  Synthesized
cagtgtactaattatgctctcttgaaattggctggagatgttgagagcaaccctggacct

SEQ ID NO: 366 - DNA, 66 bp, Artificial Sequence
  Synthesized
gtgaaacagactttgaattttgaccttctcaagttggcgggagacgtggagtccaaccctggacct

SEQ ID NO: 367 - DNA, 3062 bp, Artificial Sequence
  Synthesized
gggactcttctggtccccacagactcagagagaacccaccatggcaccgaagaagaagcgcaaggtgcatatgaatacaaaatataataaagagttcttactctacttagcagggtttgtagacggtgacggttccatctttgcctctatctatcctcatcaacgtgctaagttcaagcactttctgaagctcacgttcgcggtctatcagaagacacagcgccgttggttcctcgacaagctggtggacgagatcggtgtgggttacgtgtatgacagtggcagcgtctccgagtacaggctgtccgagatcaagcctttgcataattttttaacacaactacaaccttttctaaaactaaaacaaaaacaagcaaatttagttttaaaaattattgaacaacttccgtcagcaaaagaatccccggacaaattcttagaagtttgtacatgggtggatcaaattgcagctctgaatgattcgaggacgcgtaaaacaacttctgaaaccgttcgtgctgtgctagacagtttaccaggatccgtgggaggtctatcgccatctcaggcatccagcgccgcatcctcggcttcctcaagcccgggttcagggatctccgaagcactcagagctggagcaggttccggcactggatacaacaaggaattcctgctctacctggcgggcttcgtcgacggggacggctccatctatgcctgtatcgctccgaggcagggtagtaagttcaagcacaggctgaagctcgggttcgcggtcgggcagaagacacagcgccgttggttcctcgacaagctggtggacgagatcggtgtgggttacgtgtatgacaggggcagcgtctccgagtacgtgctgtccgagatcaagcctctgcacaacttcctgacccagctccagcccttcctgaagctcaagcagaagcaggccaacctcgtgctgaagatcatcgagcagctgccctccgccaaggaatccccggacaagttcctggaggtgtgcacctgggtggaccagatcgccgctctgaacgactccaagacccgcaagaccacttccgaaaccgtccgcgccgttctagacagtctctccgagaagaagaagtcgtccccctaggcgcccctctccctcccccccctaacgttactggccgaagccgcttggaataaggccggtgtgcgtttgtctatatgttattttccaccatattgccgtcttttggcaatgtgagggcccggaaacctggccctgtcttcttgacgagcattcctaggggtctttcccctctcgccaaaggaatgcaaggtctgttgaatgtcgtgaaggaagcagttcctctggaagcttcttgaagacaaacaacgtctgtagcgaccctttgcaggcagcggaaccccccacctggcgacaggtgcctctgcggccaaaagccacgtgtataagatacacctgcaaaggcggcacaaccccagtgccacgttgtgagttggatagttgtggaaagagtcaaatggctctcctcaagcgtattcaacaaggggctgaaggatgcccagaaggtaccccattgtatgggatctgatctggggcctcggtgcacatgctttacatgtgtttagtcgaggttaaaaaaacgtctaggccccccgaaccacggggacgtggttttcctttgaaaaacacgatgataatatggccaccatggcaccgaagaagaagcgcaaggtgcatatgaatacaaaatataataaagagttcttactctacttagcagggtttgtagacggtgacggttccatctacgccagtatccagcctcgtcaacgtagtaagttcaagcacagtctgcagctttatttcaacgtcggtcagaagacacagcgccgttggttcctcgacaagctggtggacgagatcggtgtgggttacgtgtatgaccatggcagcgtctccgagtaccgtctgtccgagatcaagcctttgcataattttttaacacaactacaaccttttctaaaactaaaacaaaaacaagcaaatttagttttaaaaattattgaacaacttccgtcagcaaaagaatccccggacaaattcttagaagtttgtacatgggtggatcaaattgcagctctgaatgattcgaagacgcgtaaaacaacttctgaaaccgttcgtgctgtgctagacagtttaccaggatccgtgggaggtctatcgccatctcaggcatccagcgccgcatcctcggcttcctcaagcccgggttcagggatctccgaagcactcagagctggagcaggttccggcactggatacaacaaggaattcctgctctacctggcgggcttcgtcgacggggacggctccatctatgccaggatcaagcctgcgcaaaatctgaagttcaagcacgctctgcatctggagttcagggtgacgcagaagacacagcgccgttggttcctcgacaagctggtggacgagatcggtgtgggtcacgtgtatgacgttggcagcgtctccgattacaggctgtccgagatcaagcctctgcacaacttcctgacccagctccagcccttcctgaagctcaagcagaagcaggccaacctcgtgctgaagatcatcgagcagctgccctccgccaaggaatccccggacaagttcctggaggtgtgcacctgggtggaccagatcgccgctctgaacgactccaagacccgcaagaccacttccgaaaccgtccgcgccgttctagacagtctctccgagaagaagaagtcgtccccctaaggtaccagcggccgcgctggagcctcggtagccgttcctcctgcccgatgggcctcccaacgggccctcctcccctccttgcaccggcccttcctggtcggcgcgccaaaaaaaaaaaaaaaaaaaaaaaaaaaaaaaaaaaaaaaaaaaaaaaaaaaaaaaaaaaaaaaaaaaaaaaaaaaaaaaaaaaaaaaaaaaaaaaaaaaaaaaaaaaaaaaaaaaaaaaaaaaaaaaaaaaaaaaaaaaa

SEQ ID NO: 368 - DNA, 2540 bp, Artificial Sequence
  Synthesized
gggactcttctggtccccacagactcagagagaacccaccatggcaccgaagaagaagcgcaaggtgcatatgaatacaaaatataataaagagttcttactctacttagcagggtttgtagacggtgacggttccatctttgcctctatctatcctcatcaacgtgctaagttcaagcactttctgaagctcacgttcgcggtctatcagaagacacagcgccgttggttcctcgacaagctggtggacgagatcggtgtgggttacgtgtatgacagtggcagcgtctccgagtacaggctgtccgagatcaagcctttgcataattttttaacacaactacaaccttttctaaaactaaaacaaaaacaagcaaatttagttttaaaaattattgaacaacttccgtcagcaaaagaatccccggacaaattcttagaagtttgtacatgggtggatcaaattgcagctctgaatgattcgaggacgcgtaaaacaacttctgaaaccgttcgtgctgtgctagacagtttaccaggatccgtgggaggtctatcgccatctcaggcatccagcgccgcatcctcggcttcctcaagcccgggttcagggatctccgaagcactcagagctggagcaggttccggcactggatacaacaaggaattcctgctctacctggcgggcttcgtcgacggggacggctccatctatgcctgtatcgctccgaggcagggtagtaagttcaagcacaggctgaagctcgggttcgcggtcgggcagaagacacagcgccgttggttcctcgacaagctggtggacgagatcggtgtgggttacgtgtatgacaggggcagcgtctccgagtacgtgctgtccgagatcaagcctctgcacaacttcctgacccagctccagcccttcctgaagctcaagcagaagcaggccaacctcgtgctgaagatcatcgagcagctgccctccgccaaggaatccccggacaagttcctggaggtgtgcacctgggtggaccagatcgccgctctgaacgactccaagacccgcaagaccacttccgaaaccgtccgcgccgttctagacagtctctccgagaagaagaagtcgtcccccggaagcggagagggcagaggaagtctgctaacatgcggtgacgtcgaggagaatcctggacctaacatggcaccgaagaagaagcgcaaggtgcatatgaatacaaaatataataaagagttcttactctacttagcagggtttgtagacggtgacggttccatctacgccagtatccagcctcgtcaacgtagtaagttcaagcacagtctgcagctttatttcaacgtcggtcagaagacacagcgccgttggttcctcgacaagctggtggacgagatcggtgtgggttacgtgtatgaccacggcagcgtctccgagtaccgtctgtccgagatcaagcctttgcataattttttaacacaactacaaccttttctaaaactaaaacaaaaacaagcaaatttagttttaaaaattattgaacaacttccgtcagcaaaagaatccccggacaaattcttagaagtttgtacatgggtggatcaaattgcagctctgaatgattcgaagacgcgtaaaacaacttctgaaaccgttcgtgctgtgctagacagtttaccaggatccgtgggaggtctatcgccatctcaggcatccagcgccgcatcctcggcttcctcaagcccgggttcagggatctccgaagcactcagagctggagcaggttccggcactggatacaacaaggaattcctgctctacctggcgggcttcgtcgacggggacggctccatctatgccaggatcaagcctgcgcaaaatctgaagttcaagcacgctctgcatctggagttcagggtgacgcagaagacacagcgccgttggttcctcgacaagctggtggacgagatcggtgtgggtcacgtgtatgacgttggcagcgtctccgattacaggctgtccgagatcaagcctctgcacaacttcctgacccagctccagcccttcctgaagctcaagcagaagcaggccaacctcgtgctgaagatcatcgagcagctgccctccgccaaggaatccccggacaagttcctggaggtgtgcacctgggtggaccagatcgccgctctgaacgactccaagacccgcaagaccacttccgaaaccgtccgcgccgttctagacagtctctccgagaagaagaagtcgtccccctaaggtaccagcggccgcgctggagcctcggtagccgttcctcctgcccgatgggcctcccaacgggccctcctcccctccttgcaccggcccttcctggtcggcgcgccaaaaaaaaaaaaaaaaaaaaaaaaaaaaaaaaaaaaaaaaaaaaaaaaaaaaaaaaaaaaaaaaaaaaaaaaaaaaaaaaaaaaaaaaaaaaaaaaaaaaaaaaaaaaaaaaaaaaaaaaaaaaaaaaaaaaaaaaaaaa

SEQ ID NO: 369 - DNA, 2543 bp, Artificial Sequence
  Synthesized
gggactcttctggtccccacagactcagagagaacccaccatggcaccgaagaagaagcgcaaggtgcatatgaatacaaaatataataaagagttcttactctacttagcagggtttgtagacggtgacggttccatctttgcctctatctatcctcatcaacgtgctaagttcaagcactttctgaagctcacgttcgcggtctatcagaagacacagcgccgttggttcctcgacaagctggtggacgagatcggtgtgggttacgtgtatgacagtggcagcgtctccgagtacaggctgtccgagatcaagcctttgcataattttttaacacaactacaaccttttctaaaactaaaacaaaaacaagcaaatttagttttaaaaattattgaacaacttccgtcagcaaaagaatccccggacaaattcttagaagtttgtacatgggtggatcaaattgcagctctgaatgattcgaggacgcgtaaaacaacttctgaaaccgttcgtgctgtgctagacagtttaccaggatccgtgggaggtctatcgccatctcaggcatccagcgccgcatcctcggcttcctcaagcccgggttcagggatctccgaagcactcagagctggagcaggttccggcactggatacaacaaggaattcctgctctacctggcgggcttcgtcgacggggacggctccatctatgcctgtatcgctccgaggcagggtagtaagttcaagcacaggctgaagctcgggttcgcggtcgggcagaagacacagcgccgttggttcctcgacaagctggtggacgagatcggtgtgggttacgtgtatgacaggggcagcgtctccgagtacgtgctgtccgagatcaagcctctgcacaacttcctgacccagctccagcccttcctgaagctcaagcagaagcaggccaacctcgtgctgaagatcatcgagcagctgccctccgccaaggaatccccggacaagttcctggaggtgtgcacctgggtggaccagatcgccgctctgaacgactccaagacccgcaagaccacttccgaaaccgtccgcgccgttctagacagtctctccgagaagaagaagtcgtcccccggaagcggagctactaacttcagcctgctgaagcaggctggagacgtggaggagaaccctggacctaacatggcaccgaagaagaagcgcaaggtgcatatgaatacaaaatataataaagagttcttactctacttagcagggtttgtagacggtgacggttccatctacgccagtatccagcctcgtcaacgtagtaagttcaagcacagtctgcagctttatttcaacgtcggtcagaagacacagcgccgttggttcctcgacaagctggtggacgagatcggtgtgggttacgtgtatgaccacggcagcgtctccgagtaccgtctgtccgagatcaagcctttgcataattttttaacacaactacaaccttttctaaaactaaaacaaaaacaagcaaatttagttttaaaaattattgaacaacttccgtcagcaaaagaatccccggacaaattcttagaagtttgtacatgggtggatcaaattgcagctctgaatgattcgaagacgcgtaaaacaacttctgaaaccgttcgtgctgtgctagacagtttaccaggatccgtgggaggtctatcgccatctcaggcatccagcgccgcatcctcggcttcctcaagcccgggttcagggatctccgaagcactcagagctggagcaggttccggcactggatacaacaaggaattcctgctctacctggcgggcttcgtcgacggggacggctccatctatgccaggatcaagcctgcgcaaaatctgaagttcaagcacgctctgcatctggagttcagggtgacgcagaagacacagcgccgttggttcctcgacaagctggtggacgagatcggtgtgggtcacgtgtatgacgttggcagcgtctccgattacaggctgtccgagatcaagcctctgcacaacttcctgacccagctccagcccttcctgaagctcaagcagaagcaggccaacctcgtgctgaagatcatcgagcagctgccctccgccaaggaatccccggacaagttcctggaggtgtgcacctgggtggaccagatcgccgctctgaacgactccaagacccgcaagaccacttccgaaaccgtccgcgccgttctagacagtctctccgagaagaagaagtcgtccccctaaggtaccagcggccgcgctggagcctcggtagccgttcctcctgcccgatgggcctcccaacgggccctcctcccctccttgcaccggcccttcctggtcggcgcgccaaaaaaaaaaaaaaaaaaaaaaaaaaaaaaaaaaaaaaaaaaaaaaaaaaaaaaaaaaaaaaaaaaaaaaaaaaaaaaaaaaaaaaaaaaaaaaaaaaaaaaaaaaaaaaaaaaaaaaaaaaaaaaaaaaaaaaaaaaaa

SEQ ID NO: 370 - DNA, 2546 bp, Artificial Sequence
  Synthesized
gggactcttctggtccccacagactcagagagaacccaccatggcaccgaagaagaagcgcaaggtgcatatgaatacaaaatataataaagagttcttactctacttagcagggtttgtagacggtgacggttccatctttgcctctatctatcctcatcaacgtgctaagttcaagcactttctgaagctcacgttcgcggtctatcagaagacacagcgccgttggttcctcgacaagctggtggacgagatcggtgtgggttacgtgtatgacagtggcagcgtctccgagtacaggctgtccgagatcaagcctttgcataattttttaacacaactacaaccttttctaaaactaaaacaaaaacaagcaaatttagttttaaaaattattgaacaacttccgtcagcaaaagaatccccggacaaattcttagaagtttgtacatgggtggatcaaattgcagctctgaatgattcgaggacgcgtaaaacaacttctgaaaccgttcgtgctgtgctagacagtttaccaggatccgtgggaggtctatcgccatctcaggcatccagcgccgcatcctcggcttcctcaagcccgggttcagggatctccgaagcactcagagctggagcaggttccggcactggatacaacaaggaattcctgctctacctggcgggcttcgtcgacggggacggctccatctatgcctgtatcgctccgaggcagggtagtaagttcaagcacaggctgaagctcgggttcgcggtcgggcagaagacacagcgccgttggttcctcgacaagctggtggacgagatcggtgtgggttacgtgtatgacaggggcagcgtctccgagtacgtgctgtccgagatcaagcctctgcacaacttcctgacccagctccagcccttcctgaagctcaagcagaagcaggccaacctcgtgctgaagatcatcgagcagctgccctccgccaaggaatccccggacaagttcctggaggtgtgcacctgggtggaccagatcgccgctctgaacgactccaagacccgcaagaccacttccgaaaccgtccgcgccgttctagacagtctctccgagaagaagaagtcgtcccccggaagcggacagtgtactaattatgctctcttgaaattggctggagatgttgagagcaaccctggacctaacatggcaccgaagaagaagcgcaaggtgcatatgaatacaaaatataataaagagttcttactctacttagcagggtttgtagacggtgacggttccatctacgccagtatccagcctcgtcaacgtagtaagttcaagcacagtctgcagctttatttcaacgtcggtcagaagacacagcgccgttggttcctcgacaagctggtggacgagatcggtgtgggttacgtgtatgaccacggcagcgtctccgagtaccgtctgtccgagatcaagcctttgcataattttttaacacaactacaaccttttctaaaactaaaacaaaaacaagcaaatttagttttaaaaattattgaacaacttccgtcagcaaaagaatccccggacaaattcttagaagtttgtacatgggtggatcaaattgcagctctgaatgattcgaagacgcgtaaaacaacttctgaaaccgttcgtgctgtgctagacagtttaccaggatccgtgggaggtctatcgccatctcaggcatccagcgccgcatcctcggcttcctcaagcccgggttcagggatctccgaagcactcagagctggagcaggttccggcactggatacaacaaggaattcctgctctacctggcgggcttcgtcgacggggacggctccatctatgccaggatcaagcctgcgcaaaatctgaagttcaagcacgctctgcatctggagttcagggtgacgcagaagacacagcgccgttggttcctcgacaagctggtggacgagatcggtgtgggtcacgtgtatgacgttggcagcgtctccgattacaggctgtccgagatcaagcctctgcacaacttcctgacccagctccagcccttcctgaagctcaagcagaagcaggccaacctcgtgctgaagatcatcgagcagctgccctccgccaaggaatccccggacaagttcctggaggtgtgcacctgggtggaccagatcgccgctctgaacgactccaagacccgcaagaccacttccgaaaccgtccgcgccgttctagacagtctctccgagaagaagaagtcgtccccctaaggtaccagcggccgcgctggagcctcggtagccgttcctcctgcccgatgggcctcccaacgggccctcctcccctccttgcaccggcccttcctggtcggcgcgccaaaaaaaaaaaaaaaaaaaaaaaaaaaaaaaaaaaaaaaaaaaaaaaaaaaaaaaaaaaaaaaaaaaaaaaaaaaaaaaaaaaaaaaaaaaaaaaaaaaaaaaaaaaaaaaaaaaaaaaaaaaaaaaaaaaaaaaaaaaa

SEQ ID NO: 371 - DNA, 2552 bp, Artificial Sequence
  Synthesized
gggactcttctggtccccacagactcagagagaacccaccatggcaccgaagaagaagcgcaaggtgcatatgaatacaaaatataataaagagttcttactctacttagcagggtttgtagacggtgacggttccatctttgcctctatctatcctcatcaacgtgctaagttcaagcactttctgaagctcacgttcgcggtctatcagaagacacagcgccgttggttcctcgacaagctggtggacgagatcggtgtgggttacgtgtatgacagtggcagcgtctccgagtacaggctgtccgagatcaagcctttgcataattttttaacacaactacaaccttttctaaaactaaaacaaaaacaagcaaatttagttttaaaaattattgaacaacttccgtcagcaaaagaatccccggacaaattcttagaagtttgtacatgggtggatcaaattgcagctctgaatgattcgaggacgcgtaaaacaacttctgaaaccgttcgtgctgtgctagacagtttaccaggatccgtgggaggtctatcgccatctcaggcatccagcgccgcatcctcggcttcctcaagcccgggttcagggatctccgaagcactcagagctggagcaggttccggcactggatacaacaaggaattcctgctctacctggcgggcttcgtcgacggggacggctccatctatgcctgtatcgctccgaggcagggtagtaagttcaagcacaggctgaagctcgggttcgcggtcgggcagaagacacagcgccgttggttcctcgacaagctggtggacgagatcggtgtgggttacgtgtatgacaggggcagcgtctccgagtacgtgctgtccgagatcaagcctctgcacaacttcctgacccagctccagcccttcctgaagctcaagcagaagcaggccaacctcgtgctgaagatcatcgagcagctgccctccgccaaggaatccccggacaagttcctggaggtgtgcacctgggtggaccagatcgccgctctgaacgactccaagacccgcaagaccacttccgaaaccgtccgcgccgttctagacagtctctccgagaagaagaagtcgtcccccggaagcggagtgaaacagactttgaattttgaccttctcaagttggcgggagacgtggagtccaaccctggacctaacatggcaccgaagaagaagcgcaaggtgcatatgaatacaaaatataataaagagttcttactctacttagcagggtttgtagacggtgacggttccatctacgccagtatccagcctcgtcaacgtagtaagttcaagcacagtctgcagctttatttcaacgtcggtcagaagacacagcgccgttggttcctcgacaagctggtggacgagatcggtgtgggttacgtgtatgaccacggcagcgtctccgagtaccgtctgtccgagatcaagcctttgcataattttttaacacaactacaaccttttctaaaactaaaacaaaaacaagcaaatttagttttaaaaattattgaacaacttccgtcagcaaaagaatccccggacaaattcttagaagtttgtacatgggtggatcaaattgcagctctgaatgattcgaagacgcgtaaaacaacttctgaaaccgttcgtgctgtgctagacagtttaccaggatccgtgggaggtctatcgccatctcaggcatccagcgccgcatcctcggcttcctcaagcccgggttcagggatctccgaagcactcagagctggagcaggttccggcactggatacaacaaggaattcctgctctacctggcgggcttcgtcgacggggacggctccatctatgccaggatcaagcctgcgcaaaatctgaagttcaagcacgctctgcatctggagttcagggtgacgcagaagacacagcgccgttggttcctcgacaagctggtggacgagatcggtgtgggtcacgtgtatgacgttggcagcgtctccgattacaggctgtccgagatcaagcctctgcacaacttcctgacccagctccagcccttcctgaagctcaagcagaagcaggccaacctcgtgctgaagatcatcgagcagctgccctccgccaaggaatccccggacaagttcctggaggtgtgcacctgggtggaccagatcgccgctctgaacgactccaagacccgcaagaccacttccgaaaccgtccgcgccgttctagacagtctctccgagaagaagaagtcgtccccctaaggtaccagcggccgcgctggagcctcggtagccgttcctcctgcccgatgggcctcccaacgggccctcctcccctccttgcaccggcccttcctggtcggcgcgccaaaaaaaaaaaaaaaaaaaaaaaaaaaaaaaaaaaaaaaaaaaaaaaaaaaaaaaaaaaaaaaaaaaaaaaaaaaaaaaaaaaaaaaaaaaaaaaaaaaaaaaaaaaaaaaaaaaaaaaaaaaaaaaaaaaaaaaaaaaa

SEQ ID NO: 372 - DNA, 3060 bp, Artificial Sequence
  Synthesized
gggactcttctggtccccacagactcagagagaacccaccatggcaccgaagaagaagcgcaaggtgcatatgaatacaaaatataataaagagttcttactctacttagcagggtttgtagacggtgacggttccatctacgccagtatccagcctcgtcaacgtagtaagttcaagcacagtctgcagctttatttcaacgtcggtcagaagacacagcgccgttggttcctcgacaagctggtggacgagatcggtgtgggttacgtgtatgaccatggcagcgtctccgagtaccgtctgtccgagatcaagcctttgcataattttttaacacaactacaaccttttctaaaactaaaacaaaaacaagcaaatttagttttaaaaattattgaacaacttccgtcagcaaaagaatccccggacaaattcttagaagtttgtacatgggtggatcaaattgcagctctgaatgattcgaagacgcgtaaaacaacttctgaaaccgttcgtgctgtgctagacagtttaccaggatccgtgggaggtctatcgccatctcaggcatccagcgccgcatcctcggcttcctcaagcccgggttcagggatctccgaagcactcagagctggagcaggttccggcactggatacaacaaggaattcctgctctacctggcgggcttcgtcgacggggacggctccatctatgccaggatcaagcctgcgcaaaatctgaagttcaagcacgctctgcatctggagttcagggtgacgcagaagacacagcgccgttggttcctcgacaagctggtggacgagatcggtgtgggtcacgtgtatgacgttggcagcgtctccgattacaggctgtccgagatcaagcctctgcacaacttcctgacccagctccagcccttcctgaagctcaagcagaagcaggccaacctcgtgctgaagatcatcgagcagctgccctccgccaaggaatccccggacaagttcctggaggtgtgcacctgggtggaccagatcgccgctctgaacgactccaagacccgcaagaccacttccgaaaccgtccgcgccgttctagacagtctctccgagaagaagaagtcgtccccctaggcgcccctctccctcccccccctaacgttactggccgaagccgcttggaataaggccggtgtgcgtttgtctatatgttattttccaccatattgccgtcttttggcaatgtgagggcccggaaacctggccctgtcttcttgacgagcattcctaggggtctttcccctctcgccaaaggaatgcaaggtctgttgaatgtcgtgaaggaagcagttcctctggaagcttcttgaagacaaacaacgtctgtagcgaccctttgcaggcagcggaaccccccacctggcgacaggtgcctctgcggccaaaagccacgtgtataagatacacctgcaaaggcggcacaaccccagtgccacgttgtgagttggatagttgtggaaagagtcaaatggctctcctcaagcgtattcaacaaggggctgaaggatgcccagaaggtaccccattgtatgggatctgatctggggcctcggtgcacatgctttacatgtgtttagtcgaggttaaaaaaacgtctaggccccccgaaccacggggacgtggttttcctttgaaaaacacgatgataatatggccaccatggcaccgaagaagaagcgcaaggtgcatatgaatacaaaatataataaagagttcttactctacttagcagggtttgtagacggtgacggttccatctttgcctctatctatcctcatcaacgtgctaagttcaagcactttctgaagctcacgttcgcggtctatcagaagacacagcgccgttggttcctcgacaagctggtggacgagatcggtgtgggttacgtgtatgacagtggcagcgtctccgagtacaggctgtccgagatcaagcctttgcataattttttaacacaactacaaccttttctaaaactaaaacaaaaacaagcaaatttagttttaaaaattattgaacaacttccgtcagcaaaagaatccccggacaaattcttagaagtttgtacatgggtggatcaaattgcagctctgaatgattcgaggacgcgtaaaacaacttctgaaaccgttcgtgctgtgctagacagtttaccaggatccgtgggaggtctatcgccatctcaggcatccagcgccgcatcctcggcttcctcaagcccgggttcagggatctccgaagcactcagagctggagcaggttccggcactggatacaacaaggaattcctgctctacctggcgggcttcgtcgacggggacggctccatctatgcctgtatcgctccgaggcagggtagtaagttcaagcacaggctgaagctcgggttcgcggtcgggcagaagacacagcgccgttggttcctcgacaagctggtggacgagatcggtgtgggttacgtgtatgacaggggcagcgtctccgagtacgtgctgtccgagatcaagcctctgcacaacttcctgacccagctccagcccttcctgaagctcaagcagaagcaggccaacctcgtgctgaagatcatcgagcagctgccctccgccaaggaatccccggacaagttcctggaggtgtgcacctgggtggaccagatcgccgctctgaacgactccaagacccgcaagaccacttccgaaaccgtccgcgccgttctagacagtctctccgagaagaagaagtcgtccccctaggtaccgcggccgcgctggagcctcggtagccgttcctcctgcccgatgggcctcccaacgggccctcctcccctccttgcaccggcccttcctggtcggcgcgccaaaaaaaaaaaaaaaaaaaaaaaaaaaaaaaaaaaaaaaaaaaaaaaaaaaaaaaaaaaaaaaaaaaaaaaaaaaaaaaaaaaaaaaaaaaaaaaaaaaaaaaaaaaaaaaaaaaaaaaaaaaaaaaaaaaaaaaaaaaa

SEQ ID NO: 373 - DNA, 2538 bp, Artificial Sequence
  Synthesized
gggactcttctggtccccacagactcagagagaacccaccatggcaccgaagaagaagcgcaaggtgcatatgaatacaaaatataataaagagttcttactctacttagcagggtttgtagacggtgacggttccatctacgccagtatccagcctcgtcaacgtagtaagttcaagcacagtctgcagctttatttcaacgtcggtcagaagacacagcgccgttggttcctcgacaagctggtggacgagatcggtgtgggttacgtgtatgaccatggcagcgtctccgagtaccgtctgtccgagatcaagcctttgcataattttttaacacaactacaaccttttctaaaactaaaacaaaaacaagcaaatttagttttaaaaattattgaacaacttccgtcagcaaaagaatccccggacaaattcttagaagtttgtacatgggtggatcaaattgcagctctgaatgattcgaagacgcgtaaaacaacttctgaaaccgttcgtgctgtgctagacagtttaccaggatccgtgggaggtctatcgccatctcaggcatccagcgccgcatcctcggcttcctcaagcccgggttcagggatctccgaagcactcagagctggagcaggttccggcactggatacaacaaggaattcctgctctacctggcgggcttcgtcgacggggacggctccatctatgccaggatcaagcctgcgcaaaatctgaagttcaagcacgctctgcatctggagttcagggtgacgcagaagacacagcgccgttggttcctcgacaagctggtggacgagatcggtgtgggtcacgtgtatgacgttggcagcgtctccgattacaggctgtccgagatcaagcctctgcacaacttcctgacccagctccagcccttcctgaagctcaagcagaagcaggccaacctcgtgctgaagatcatcgagcagctgccctccgccaaggaatccccggacaagttcctggaggtgtgcacctgggtggaccagatcgccgctctgaacgactccaagacccgcaagaccacttccgaaaccgtccgcgccgttctagacagtctctccgagaagaagaagtcgtcccccggaagcggagagggcagaggaagtctgctaacatgcggtgacgtcgaggagaatcctggacctaacatggcaccgaagaagaagcgcaaggtgcatatgaatacaaaatataataaagagttcttactctacttagcagggtttgtagacggtgacggttccatctttgcctctatctatcctcatcaacgtgctaagttcaagcactttctgaagctcacgttcgcggtctatcagaagacacagcgccgttggttcctcgacaagctggtggacgagatcggtgtgggttacgtgtatgacagtggcagcgtctccgagtacaggctgtccgagatcaagcctttgcataattttttaacacaactacaaccttttctaaaactaaaacaaaaacaagcaaatttagttttaaaaattattgaacaacttccgtcagcaaaagaatccccggacaaattcttagaagtttgtacatgggtggatcaaattgcagctctgaatgattcgaggacgcgtaaaacaacttctgaaaccgttcgtgctgtgctagacagtttaccaggatccgtgggaggtctatcgccatctcaggcatccagcgccgcatcctcggcttcctcaagcccgggttcagggatctccgaagcactcagagctggagcaggttccggcactggatacaacaaggaattcctgctctacctggcgggcttcgtcgacggggacggctccatctatgcctgtatcgctccgaggcagggtagtaagttcaagcacaggctgaagctcgggttcgcggtcgggcagaagacacagcgccgttggttcctcgacaagctggtggacgagatcggtgtgggttacgtgtatgacaggggcagcgtctccgagtacgtgctgtccgagatcaagcctctgcacaacttcctgacccagctccagcccttcctgaagctcaagcagaagcaggccaacctcgtgctgaagatcatcgagcagctgccctccgccaaggaatccccggacaagttcctggaggtgtgcacctgggtggaccagatcgccgctctgaacgactccaagacccgcaagaccacttccgaaaccgtccgcgccgttctagacagtctctccgagaagaagaagtcgtccccctaggtaccgcggccgcgctggagcctcggtagccgttcctcctgcccgatgggcctcccaacgggccctcctcccctccttgcaccggcccttcctggtcggcgcgccaaaaaaaaaaaaaaaaaaaaaaaaaaaaaaaaaaaaaaaaaaaaaaaaaaaaaaaaaaaaaaaaaaaaaaaaaaaaaaaaaaaaaaaaaaaaaaaaaaaaaaaaaaaaaaaaaaaaaaaaaaaaaaaaaaaaaaaaaaaa

SEQ ID NO: 374 - DNA, 2541 bp, Artificial Sequence
  Synthesized
gggactcttctggtccccacagactcagagagaacccaccatggcaccgaagaagaagcgcaaggtgcatatgaatacaaaatataataaagagttcttactctacttagcagggtttgtagacggtgacggttccatctacgccagtatccagcctcgtcaacgtagtaagttcaagcacagtctgcagctttatttcaacgtcggtcagaagacacagcgccgttggttcctcgacaagctggtggacgagatcggtgtgggttacgtgtatgaccatggcagcgtctccgagtaccgtctgtccgagatcaagcctttgcataattttttaacacaactacaaccttttctaaaactaaaacaaaaacaagcaaatttagttttaaaaattattgaacaacttccgtcagcaaaagaatccccggacaaattcttagaagtttgtacatgggtggatcaaattgcagctctgaatgattcgaagacgcgtaaaacaacttctgaaaccgttcgtgctgtgctagacagtttaccaggatccgtgggaggtctatcgccatctcaggcatccagcgccgcatcctcggcttcctcaagcccgggttcagggatctccgaagcactcagagctggagcaggttccggcactggatacaacaaggaattcctgctctacctggcgggcttcgtcgacggggacggctccatctatgccaggatcaagcctgcgcaaaatctgaagttcaagcacgctctgcatctggagttcagggtgacgcagaagacacagcgccgttggttcctcgacaagctggtggacgagatcggtgtgggtcacgtgtatgacgttggcagcgtctccgattacaggctgtccgagatcaagcctctgcacaacttcctgacccagctccagcccttcctgaagctcaagcagaagcaggccaacctcgtgctgaagatcatcgagcagctgccctccgccaaggaatccccggacaagttcctggaggtgtgcacctgggtggaccagatcgccgctctgaacgactccaagacccgcaagaccacttccgaaaccgtccgcgccgttctagacagtctctccgagaagaagaagtcgtcccccggaagcggagctactaacttcagcctgctgaagcaggctggagacgtggaggagaaccctggacctaacatggcaccgaagaagaagcgcaaggtgcatatgaatacaaaatataataaagagttcttactctacttagcagggtttgtagacggtgacggttccatctttgcctctatctatcctcatcaacgtgctaagttcaagcactttctgaagctcacgttcgcggtctatcagaagacacagcgccgttggttcctcgacaagctggtggacgagatcggtgtgggttacgtgtatgacagtggcagcgtctccgagtacaggctgtccgagatcaagcctttgcataattttttaacacaactacaaccttttctaaaactaaaacaaaaacaagcaaatttagttttaaaaattattgaacaacttccgtcagcaaaagaatccccggacaaattcttagaagtttgtacatgggtggatcaaattgcagctctgaatgattcgaggacgcgtaaaacaacttctgaaaccgttcgtgctgtgctagacagtttaccaggatccgtgggaggtctatcgccatctcaggcatccagcgccgcatcctcggcttcctcaagcccgggttcagggatctccgaagcactcagagctggagcaggttccggcactggatacaacaaggaattcctgctctacctggcgggcttcgtcgacggggacggctccatctatgcctgtatcgctccgaggcagggtagtaagttcaagcacaggctgaagctcgggttcgcggtcgggcagaagacacagcgccgttggttcctcgacaagctggtggacgagatcggtgtgggttacgtgtatgacaggggcagcgtctccgagtacgtgctgtccgagatcaagcctctgcacaacttcctgacccagctccagcccttcctgaagctcaagcagaagcaggccaacctcgtgctgaagatcatcgagcagctgccctccgccaaggaatccccggacaagttcctggaggtgtgcacctgggtggaccagatcgccgctctgaacgactccaagacccgcaagaccacttccgaaaccgtccgcgccgttctagacagtctctccgagaagaagaagtcgtccccctaggtaccgcggccgcgctggagcctcggtagccgttcctcctgcccgatgggcctcccaacgggccctcctcccctccttgcaccggcccttcctggtcggcgcgccaaaaaaaaaaaaaaaaaaaaaaaaaaaaaaaaaaaaaaaaaaaaaaaaaaaaaaaaaaaaaaaaaaaaaaaaaaaaaaaaaaaaaaaaaaaaaaaaaaaaaaaaaaaaaaaaaaaaaaaaaaaaaaaaaaaaaaaaaaaa

SEQ ID NO: 375 - DNA, 2544 bp, Artificial Sequence
  Synthesized
gggactcttctggtccccacagactcagagagaacccaccatggcaccgaagaagaagcgcaaggtgcatatgaatacaaaatataataaagagttcttactctacttagcagggtttgtagacggtgacggttccatctacgccagtatccagcctcgtcaacgtagtaagttcaagcacagtctgcagctttatttcaacgtcggtcagaagacacagcgccgttggttcctcgacaagctggtggacgagatcggtgtgggttacgtgtatgaccatggcagcgtctccgagtaccgtctgtccgagatcaagcctttgcataattttttaacacaactacaaccttttctaaaactaaaacaaaaacaagcaaatttagttttaaaaattattgaacaacttccgtcagcaaaagaatccccggacaaattcttagaagtttgtacatgggtggatcaaattgcagctctgaatgattcgaagacgcgtaaaacaacttctgaaaccgttcgtgctgtgctagacagtttaccaggatccgtgggaggtctatcgccatctcaggcatccagcgccgcatcctcggcttcctcaagcccgggttcagggatctccgaagcactcagagctggagcaggttccggcactggatacaacaaggaattcctgctctacctggcgggcttcgtcgacggggacggctccatctatgccaggatcaagcctgcgcaaaatctgaagttcaagcacgctctgcatctggagttcagggtgacgcagaagacacagcgccgttggttcctcgacaagctggtggacgagatcggtgtgggtcacgtgtatgacgttggcagcgtctccgattacaggctgtccgagatcaagcctctgcacaacttcctgacccagctccagcccttcctgaagctcaagcagaagcaggccaacctcgtgctgaagatcatcgagcagctgccctccgccaaggaatccccggacaagttcctggaggtgtgcacctgggtggaccagatcgccgctctgaacgactccaagacccgcaagaccacttccgaaaccgtccgcgccgttctagacagtctctccgagaagaagaagtcgtcccccggaagcggacagtgtactaattatgctctcttgaaattggctggagatgttgagagcaaccctggacctaacatggcaccgaagaagaagcgcaaggtgcatatgaatacaaaatataataaagagttcttactctacttagcagggtttgtagacggtgacggttccatctttgcctctatctatcctcatcaacgtgctaagttcaagcactttctgaagctcacgttcgcggtctatcagaagacacagcgccgttggttcctcgacaagctggtggacgagatcggtgtgggttacgtgtatgacagtggcagcgtctccgagtacaggctgtccgagatcaagcctttgcataattttttaacacaactacaaccttttctaaaactaaaacaaaaacaagcaaatttagttttaaaaattattgaacaacttccgtcagcaaaagaatccccggacaaattcttagaagtttgtacatgggtggatcaaattgcagctctgaatgattcgaggacgcgtaaaacaacttctgaaaccgttcgtgctgtgctagacagtttaccaggatccgtgggaggtctatcgccatctcaggcatccagcgccgcatcctcggcttcctcaagcccgggttcagggatctccgaagcactcagagctggagcaggttccggcactggatacaacaaggaattcctgctctacctggcgggcttcgtcgacggggacggctccatctatgcctgtatcgctccgaggcagggtagtaagttcaagcacaggctgaagctcgggttcgcggtcgggcagaagacacagcgccgttggttcctcgacaagctggtggacgagatcggtgtgggttacgtgtatgacaggggcagcgtctccgagtacgtgctgtccgagatcaagcctctgcacaacttcctgacccagctccagcccttcctgaagctcaagcagaagcaggccaacctcgtgctgaagatcatcgagcagctgccctccgccaaggaatccccggacaagttcctggaggtgtgcacctgggtggaccagatcgccgctctgaacgactccaagacccgcaagaccacttccgaaaccgtccgcgccgttctagacagtctctccgagaagaagaagtcgtccccctaggtaccgcggccgcgctggagcctcggtagccgttcctcctgcccgatgggcctcccaacgggccctcctcccctccttgcaccggcccttcctggtcggcgcgccaaaaaaaaaaaaaaaaaaaaaaaaaaaaaaaaaaaaaaaaaaaaaaaaaaaaaaaaaaaaaaaaaaaaaaaaaaaaaaaaaaaaaaaaaaaaaaaaaaaaaaaaaaaaaaaaaaaaaaaaaaaaaaaaaaaaaaaaaaaa

SEQ ID NO: 376 - DNA, 2550 bp, Artificial Sequence
  Synthesized
gggactcttctggtccccacagactcagagagaacccaccatggcaccgaagaagaagcgcaaggtgcatatgaatacaaaatataataaagagttcttactctacttagcagggtttgtagacggtgacggttccatctacgccagtatccagcctcgtcaacgtagtaagttcaagcacagtctgcagctttatttcaacgtcggtcagaagacacagcgccgttggttcctcgacaagctggtggacgagatcggtgtgggttacgtgtatgaccatggcagcgtctccgagtaccgtctgtccgagatcaagcctttgcataattttttaacacaactacaaccttttctaaaactaaaacaaaaacaagcaaatttagttttaaaaattattgaacaacttccgtcagcaaaagaatccccggacaaattcttagaagtttgtacatgggtggatcaaattgcagctctgaatgattcgaagacgcgtaaaacaacttctgaaaccgttcgtgctgtgctagacagtttaccaggatccgtgggaggtctatcgccatctcaggcatccagcgccgcatcctcggcttcctcaagcccgggttcagggatctccgaagcactcagagctggagcaggttccggcactggatacaacaaggaattcctgctctacctggcgggcttcgtcgacggggacggctccatctatgccaggatcaagcctgcgcaaaatctgaagttcaagcacgctctgcatctggagttcagggtgacgcagaagacacagcgccgttggttcctcgacaagctggtggacgagatcggtgtgggtcacgtgtatgacgttggcagcgtctccgattacaggctgtccgagatcaagcctctgcacaacttcctgacccagctccagcccttcctgaagctcaagcagaagcaggccaacctcgtgctgaagatcatcgagcagctgccctccgccaaggaatccccggacaagttcctggaggtgtgcacctgggtggaccagatcgccgctctgaacgactccaagacccgcaagaccacttccgaaaccgtccgcgccgttctagacagtctctccgagaagaagaagtcgtcccccggaagcggagtgaaacagactttgaattttgaccttctcaagttggcgggagacgtggagtccaaccctggacctaacatggcaccgaagaagaagcgcaaggtgcatatgaatacaaaatataataaagagttcttactctacttagcagggtttgtagacggtgacggttccatctttgcctctatctatcctcatcaacgtgctaagttcaagcactttctgaagctcacgttcgcggtctatcagaagacacagcgccgttggttcctcgacaagctggtggacgagatcggtgtgggttacgtgtatgacagtggcagcgtctccgagtacaggctgtccgagatcaagcctttgcataattttttaacacaactacaaccttttctaaaactaaaacaaaaacaagcaaatttagttttaaaaattattgaacaacttccgtcagcaaaagaatccccggacaaattcttagaagtttgtacatgggtggatcaaattgcagctctgaatgattcgaggacgcgtaaaacaacttctgaaaccgttcgtgctgtgctagacagtttaccaggatccgtgggaggtctatcgccatctcaggcatccagcgccgcatcctcggcttcctcaagcccgggttcagggatctccgaagcactcagagctggagcaggttccggcactggatacaacaaggaattcctgctctacctggcgggcttcgtcgacggggacggctccatctatgcctgtatcgctccgaggcagggtagtaagttcaagcacaggctgaagctcgggttcgcggtcgggcagaagacacagcgccgttggttcctcgacaagctggtggacgagatcggtgtgggttacgtgtatgacaggggcagcgtctccgagtacgtgctgtccgagatcaagcctctgcacaacttcctgacccagctccagcccttcctgaagctcaagcagaagcaggccaacctcgtgctgaagatcatcgagcagctgccctccgccaaggaatccccggacaagttcctggaggtgtgcacctgggtggaccagatcgccgctctgaacgactccaagacccgcaagaccacttccgaaaccgtccgcgccgttctagacagtctctccgagaagaagaagtcgtccccctaggtaccgcggccgcgctggagcctcggtagccgttcctcctgcccgatgggcctcccaacgggccctcctcccctccttgcaccggcccttcctggtcggcgcgccaaaaaaaaaaaaaaaaaaaaaaaaaaaaaaaaaaaaaaaaaaaaaaaaaaaaaaaaaaaaaaaaaaaaaaaaaaaaaaaaaaaaaaaaaaaaaaaaaaaaaaaaaaaaaaaaaaaaaaaaaaaaaaaaaaaaaaaaaaaa

1.-68. (canceled)

69. A recombinant meganuclease that recognizes and cleaves a recognition sequence comprising SEQ ID NO: 2 within the human beta-2 microglobulin gene, wherein said recombinant meganuclease comprises:
(a) a first subunit which binds to a first recognition half-site of said recognition sequence and comprises a first hypervariable (HVR1) region, wherein said first subunit comprises an amino acid sequence having at least 80% sequence identity to residues 198-344 of any one of SEQ ID NOs: 12-96 or residues 7-153 of any one of SEQ ID NOs: 97-100; and
(b) a second subunit which binds to a second recognition half-site of said recognition sequence and comprises a second hypervariable (HVR2) region, wherein said second subunit comprises an amino acid sequence having at least 80% sequence identity to residues 7-153 of any one of SEQ ID NOs: 12-96 or residues 198-344 of any one of SEQ ID NOs:97-100.

70. The recombinant meganuclease of claim 69, wherein said HVR2 region comprises Y at a position corresponding to:
(a) position 24 of any one of SEQ ID NOs: 12-96; or
(b) position 215 of any one of SEQ ID NOs: 97-100.

71. The recombinant meganuclease of claim 69, wherein said HVR1 region comprises residues 215-270 of any one of SEQ ID NOs: 12-96 or residues 24-79 of any one of SEQ ID NOs: 97-100.

72. The recombinant meganuclease of claim 69, wherein said HVR2 region comprises residues 24-79 of any one of SEQ ID NOs: 12-96 or residues 215-270 of any one of SEQ ID NOs: 97-100.

73. The recombinant meganuclease of claim 69, wherein said first subunit comprises residues 198-344 of any one of SEQ ID NOs: 12-96 or residues 7-153 of any one of SEQ ID NOs: 97-100.

74. The recombinant meganuclease of claim 69, wherein said second subunit comprises residues 7-153 of any one of SEQ ID NOs: 12-96 or residues 198-344 of any one of SEQ ID NOs: 97-100.

75. The recombinant meganuclease of claim 69, wherein said recombinant meganuclease is a single-chain meganuclease comprising a linker, wherein said linker covalently joins said first subunit and said second subunit.

76. The recombinant meganuclease of claim 69, wherein said recombinant meganuclease comprises the amino acid sequence of any one of SEQ ID NOs: 12-100.

77. An isolated polynucleotide comprising a nucleic acid sequence encoding said recombinant meganuclease of claim 69.

78. A recombinant DNA construct comprising said isolated polynucleotide of claim 77.

79. A recombinant AAV vector comprising said isolated polynucleotide of claim 77.

80. A method for producing a genetically-modified eukaryotic cell comprising an exogenous sequence of interest inserted in a chromosome of said eukaryotic cell, said method comprising transfecting a eukaryotic cell with one or more nucleic acids including:
(a) a nucleic acid sequence encoding a recombinant meganuclease of any one of claims 69-76; and
(b) a nucleic acid sequence comprising said sequence of interest;
wherein said recombinant meganuclease produces a cleavage site in said chromosome at a recognition sequence comprising SEQ ID NO:2, and wherein said sequence of interest is inserted into said chromosome at said cleavage site.

81. The method of claim 80, wherein said nucleic acid comprising said sequence of interest further comprises sequences homologous to sequences flanking said cleavage site, and wherein said sequence of interest is inserted at said cleavage site by homologous recombination.

82. The method of claim 80, wherein said sequence of interest encodes a chimeric antigen receptor.

83. The method of claim 80, wherein at least said nucleic acid comprising said sequence of interest is introduced into said eukaryotic cell by a recombinant AAV vector.

84. The method of claim 80, wherein said eukaryotic cell is a human T cell, or a cell derived therefrom.

85. A method for producing a genetically-modified eukaryotic cell comprising an exogenous sequence of interest inserted in a chromosome of said eukaryotic cell, said method comprising:
(a) introducing said recombinant meganuclease of any one of claims 69-76 into a eukaryotic cell; and
(b) transfecting said eukaryotic cell with a nucleic acid comprising said sequence of interest;
wherein said recombinant meganuclease produces a cleavage site in said chromosome at a recognition sequence comprising SEQ ID NO:2, and wherein said sequence of interest is inserted into said chromosome at said cleavage site.

86. The method of claim 85, wherein said nucleic acid comprising said sequence of interest further comprises sequences homologous to sequences flanking said cleavage site, and wherein said sequence of interest is inserted at said cleavage site by homologous recombination.

87. The method of any one of claim 85, wherein said sequence of interest encodes a chimeric antigen receptor.

88. The method of claim 85, wherein at least said nucleic acid comprising said sequence of interest is introduced into said eukaryotic cell by a recombinant AAV vector.

89. The method of claim 85, wherein said eukaryotic cell is a human T cell, or a cell derived therefrom.

90. A method for producing a genetically-modified eukaryotic cell by disrupting a target sequence in a chromosome of said eukaryotic cell, said method comprising:
transfecting said eukaryotic cell with a nucleic acid encoding said recombinant meganuclease of any one of claims 69-76;
wherein said meganuclease produces a cleavage site in said chromosome at a recognition sequence comprising SEQ ID NO:2, and wherein said target sequence is disrupted by non-homologous end-joining at said cleavage site, and wherein said genetically-modified eukaryotic cell exhibits reduced cell-surface expression of beta-2 microglobulin when compared to a control cell.

91. The method of claim 90, wherein said eukaryotic cell is a human T cell, or a cell derived therefrom.

92. A method for producing a genetically-modified eukaryotic cell by disrupting a target sequence in a chromosome of said eukaryotic cell, comprising:
introducing said recombinant meganuclease of any one of claims 69-76 into said eukaryotic cell;
wherein said meganuclease produces a cleavage site in said chromosome at a recognition sequence comprising SEQ ID NO:2, and wherein said target sequence is disrupted by non-homologous end-joining at said cleavage site, and wherein said genetically-modified eukaryotic cell exhibits reduced cell-surface expression of beta-2 microglobulin when compared to a control cell.

93. The method of claim 92, wherein said eukaryotic cell is a human T cell, or a cell derived therefrom.
